(19) United States
(12) Patent Application Publication
(10) Pub. No.: US 2023/0365709 A1
(43) Pub. Date: Nov. 16, 2023

(54) TRISPECIFIC BINDERS

(71) Applicant: Affimed GmbH, Heidelberg (DE)

(72) Inventors: Thorsten ROSS, Heidelberg (DE); Joachim KOCH, Heidelberg (DE); Michael TESAR, Heidelberg (DE); Holger DULAT, Heidelberg (DE); Christian BREUNIG, Heidelberg (DE); Eike PETERS, Heidelberg (DE); Kristina ELLWANGER, Heidelberg (DE); Ivica FUCEK, Heidelberg (DE); Uwe REUSCH, Heidelberg (DE); Jens PAHL, Heidelberg (DE)

(21) Appl. No.: 18/030,628

(22) PCT Filed: Oct. 8, 2021
(86) PCT No.: PCT/EP2021/077882

§ 371 Date: Apr. 6, 2023

(30) Foreign Application Priority Data
Oct. 8, 2020 (EP) 20200845.4

(51) Int. Cl. C07K 16/32; C07K 16/28; C07K 16/46; A61P 35/00

(52) U.S. Cl. CPC C07K 16/32; C07K 16/283; C07K 16/468; A61P 35/00; C07K 16/2863; C07K 16/2803; C07K 2317/31; C07K 2317/622; C07K 2317/64; C07K 2317/732; C07K 2317/92; C07K 2317/75

(57) ABSTRACT

The present invention relates to a trispecific antibody construct comprising (i.) a first binding domain (A), which is capable of specifically binding to a first target (A′) that is CD16A on the surface of an immune effector cell; (ii.) a second binding domain (B), which is capable of specifically binding to a second target (B′) that is another antigen on the surface of an immune effector cell, wherein said antigen is selected from the group comprising CD56, NKG2A, NKG2D, NKp30, NKp44, NKp46, NKp80, DNAM-1, SLAMF7, OX40, CD47/SIRPα, CD89, CD96, CD137, CD160, TIGIT, nectin-4, PD-1, PD-L1, LAG-3, CTLA-4, TIM-3, KIR2DL1-5, KIR3DL1-3, KIR2DS1-5 and CD3; and (iii.) a third binding domain (C), which is capable of specifically binding to a third target (C′) that is an antigen on the surface of a target cell. The present invention also relates to related nucleic acid molecules, vectors, host cells, methods of producing the antibody constructs, pharmaceutical compositions, medical uses, and kits.

### FIELD OF THE INVENTION

[0001] The present invention relates to a trispecific antibody construct comprising (i.) a first binding domain (A), which is capable of specifically binding to a first target (A′) that is CD16A on the surface of an immune effector cell; (ii.) a second binding domain (B), which is capable of specifically binding to a second target (B′) that is another antigen on the surface of an immune effector cell; and (iii.) a third binding domain (C), which is capable of specifically binding to a third target (C′) that is an antigen on the surface of a target cell. The present invention also relates to related nucleic acid molecules, vectors, host cells, methods of producing the antibody constructs, pharmaceutical compositions, medical uses, and kits.

### BACKGROUND

[0002] WO 2006/125668 and Reusch et al, MABS, 2014, 6:3:728-739 describe an antigen-binding protein—a bispecific tandem diabody—for engagement of CD16A and its use for natural killer (NK) cell therapy. WO 2019/198051 and Ellwanger et al., mAbs 2019 describe multispecific antigen-binding proteins for engagement of CD16A (FcγRIIIA) on NK cells through this triggering NK cell cytotoxicity.

[0003] Natural killer cells are cytotoxic, IFN-γ and TNF-α producing innate lymphoid cells that are considered the first line of defense against virus-infected cells and cancer cells (Cerwenka and Lanier 2001). The cytotoxic potential of NK cells can be utilized in cancer immunotherapy by redirecting NK cell lysis to tumor cells and stimulating the activating receptor CD16A, also known as FcγRIIIA, expressed on the surface of NK cells. CD16A activation promotes NK cell proliferation and memory-like cytotoxicity against cancer cells (Pahl et al 2018 Cancer Immunol Res; 6(5), 517-27; DOI: 10.1158/2326-6066.CIR-17-0550). The cytotoxic activity of NK cells can be enhanced by increasing the avidity through multivalent binding to CD16A, e.g. using constructs with bivalent binding to CD16A (WO2019/198051 Affimed GmbH).

[0004] Directing NK cells for tumor cell lysis using multispecific antibodies is considered a potent immunotherapeutic approach and offers opportunities for increasing specificity, potency, and utilizing novel mechanisms of action. For example, each of the antigen-binding moieties may be selected from the group consisting of a single-chain diabody (scDb), a diabody (db), a single chain Fv (scFv) or a Fab fragment. Bispecific antibodies consisting of one arm which binds CD16A and another which binds a tumor-associated antigen (e.g. CD19) have been developed (Kellner et al 2011 Cancer Lett. 303(2): 128-139).

[0005] NK cells are equipped with multiple activating and inhibitory receptors on their surface jointly regulating NK cell activation and triggering of effector functions. Several of these receptors play a pivotal role for NK cell mediated recognition and killing of cancer cells. Bi- or multispecific antibodies or binding proteins cross-linking two different NK cell receptors to recruit and activate NK cells are in development. In one approach a multifunctional binding protein engages NK cells by binding NKp46 and CD16A in addition to an antigen on cancer cells. In another approach, a bispecific antibody has incorporated one antigen-binding site for NKG2D and another one for a tumor-associated antigen. This antibody format contains a Fc domain, which can bind CD16A of NK cells. In a third approach a multispecific NK cell engager targeting NKp30 with one antigen-binding site and a tumor-associated antigen with the second antigen-binding site was used.

[0006] The lack of NK cell fratricide is an important feature for high-affinity, at least bivalent and/or multi-specific immune cell engager formats that are characterized by longer cell retention times and that are either to be used for the engagement of endogenous NK cells or that are to be combined with NK cellular therapeutic approaches (WO 2019/198051 Affimed GmbH). Hence, NK cell cross-linking with NK cells or other immune cells is expected to reduce therapeutic efficacy of NK cell-engagement. Most importantly, cross-linking of a NK cell with one or more NK cells or other immune cells through bivalent or multivalent interactions with FcRγ or in combination with a second immune cell antigen (e.g. NKG2D, NKp30, SLAMF7, CD38) can cause immune cell activation. This might lead to induction of target cell-driven fratricide or immune cell killing (e.g. NK-NK cell lysis), ultimately resulting in efficient NK cell depletion in vivo, as previously described for a CD16-directed murine IgG antibody (3G8), the CD38-directed antibody daratumumab and other approaches (Choi et al 2008 Immunology 124 (2) 215-22; DOI: 10.1111/j.1365-2567.2007.02757.x; Yoshida 2010 Front. Microbiol 1:128 DOI: 10.3389/fmicb.2010.00128; Wang et al 2018 Clin Cancer Res, 24(16): 4006-4017; DOI: 10.1158/1078-0432.CCR-17-3117; His et al 2008; Nakamura 2013 PNAS; 110(23) 9421-9426; DOI: 10.1073/pnas.1300140110; Breman et al 2018 Front Immunol, 12(9)2940; DOI: 10.3389/fimmu.2018.02940).

[0007] The existing immuno-oncology therapies with multispecific binding proteins inducing NK cell activation by binding to CD16 as well as a second NK cell antigen are only effective to a certain extent for most tumor indications. Further improvement of multispecific binding proteins with sufficient reduction of immune cell fratricide are urgently needed. The present invention addresses this need as indicated herein.

### BRIEF DESCRIPTION OF THE DRAWINGS

[0008] FIG. 1: Schematic depiction of antibody constructs 2Fab-scFc-1scDb (left) and 2Fab-scFc-1scFv (right). The first binding domain (A) is specific for CD16A, the second binding domain (B) is specific for another target for on the surface of an immune effector cell (IC), the third binding domain (A) is specific for an antigen on the surface of a target cell (TAA).

[0009] FIG. 2: Schematic depiction of antibody constructs 2Fab-1scDb-AFc (left) and 2Fab-1scFv-AFc (right).

[0010] FIG. 3: Schematic depiction of antibody construct 1Fab-1scDb-AFc.

[0011] FIG. 4: Schematic depiction of antibody constructs 2scDb-AFc (left) and 1scDb-1scFv-AFc (right).

[0012] FIG. 5: Schematic depiction of antibody constructs 2tascFv-AFc (left) and 1tascFv-1scFv-1scFv-AFc (right).

[0013] FIG. 6: Schematic depiction of antibody constructs 1scDb-2Fab-AFc (left) and 1scDb-1Fab-AFc (right).

[0014] FIG. 7: Schematic depiction of antibody construct AIG-2scFv.

[0015] FIG. 8: Schematic depiction of antibody construct IG-2scDb.

[0016] FIG. 9: Schematic depiction of antibody construct AIG-2scDb.

[0017] FIG. 10: Schematic depiction of antibody construct AIG-1scDb.

[0018] FIG. 11: Schematic depiction of antibody construct AIG-1scFv.

[0019] FIG. 12: Schematic depiction of antibody construct 1Fab-AFc-1Fab.

[0020] FIG. 13: Purity of NK cells enriched from PBMC. PBMC were isolated from buffy coats by density gradient centrifugation. NK cells were enriched from PBMC by negative selection. After flow cytometric staining with fluorescent-labeled antibodies, single-cell SSC/FSC-live-gated cells were gated as CD45⁺ PBMC or enriched NK cells. Afterwards, monocytes were gated as CD14⁺ FSC^{high} cells in PBMC or enriched NK cells. Within the CD14⁻ cell population, NK cells were gated as CD56⁺ CD3⁻ cells and T cells (devoid of CD56⁺ NKT cells) as CD3⁺ CD56⁻ cells. Within the CD14⁻ cell population, the overall content of B cells and T cells were determined as CD19⁺ CD3⁻ cells and CD3⁺ CD19⁻ cells, respectively. Within the CD56⁺ CD3⁻ CD14⁻ cell population, the proportion of CD56⁺ CD16⁺ NK cells was additionally determined.

[0021] FIG. 14: Representation of CD16a (left) and NKp46 (right). The binding region of CD16a to Fc as well as the location of Y158 are highlighted in the structure of CD16a. The location of epitopes NKp46-1 and NKp46-3 are highlighted in the structure of NKp46.

[0022] FIG. 15: Schematic representation of different exemplary antibody constructs and the theoretical distance between the first (CD16a) binding site and the second (here: NKG2D) binding site.

[0023] FIG. 16 NK cell fratricide assay with trispecifc HER2/CD16A/NKG2D antibody constructs. HER2/CD16A/NKG2D trispecific constructs AIG-2scFv-7, AIG-2scFv-8, and AIG-2scFv-10, were tested together with control antibody constructs AIG-2scFv-14 (HER2/NKG2D/NKG2D), AIG-2scFv-15 (HER2/NKG2D/RSV), and AIG-1scFv-4 (HER2/NKG2D) at the indicated concentrations in 4 h calcein-release NK cell fratricide assays. Human IgG1 anti-CD38 (IgAb-51, SEQ ID NOs: 429-430) was used as a positive control for induction of NK cell fratricide.

[0024] FIG. 17 shows analysis of expressed half-antibodies containing (A) knob- or (B) hole mutations in their Fc, and (C-D) during the heterodimerization by asymmetric assembly. Protein samples were run in SDS-PAGE under non-reducing (nR) or reducing (R) conditions to separate disulfide bridges between heavy chains (HC) and light chains (LC), whereby the intact half antibodies run at the expected mass of 100 kDa under non-reducing conditions, or 77 kDa for the HC and 23 kDa for the LC under reducing conditions. (C) Assembly of the asymmetric antibody AIG-2scFv-8 (SEQ ID NOs: 434-436) takes place fast after mixing and supplementation with reduced L-Glutathione (0d) and is complete after one day (1d) incubation as visualized by formation of the assembled product running at >200 kDa on non-reducing SDS-PAGE. (D) Purity and size of the assembled asymmetric antibody analyzed by SEC/MALS-HPLC revealed the expected sizes of assembled antibody with 89% purity and minor factions of ˜5% higher molecular weight (HMW) and ˜6% lower molecular weight (LMW) forms.

[0025] FIG. 18 Concentration-dependent induction of tumor cell lysis by trispecific antibody constructs using primary NK cells as effector cells in 4 h calcein-release cytotoxicity assays. Calcein-labeled CD19⁺ GRANTA-519 target cells (A) or EGFR⁺ A-431 target cells (B) were co-cultured for 4 h with enriched primary human NK cells as effector cells at an E:T ratio of 5:1 in the presence of serial dilutions of the respective antibodies in duplicates. Fc-enhanced anti-CD19 IgG1 (IgAb-67), anti-EGFR IgG1 (IgAb-53), and without (w/o) antibody were used as controls. Mean lysis values and standard deviations (SD) as error bars are plotted. The experiments were carried out in biological duplicates and the graph of one representative experiment is shown.

[0026] FIG. 19 Exemplary binding of trispecific molecules CD19/CD16A/NKG2D AIG-2scFv-17 and CD19/CD16A/NKp46 AIG-2scFv-18 to recombinant human CD16A (158F), CD16B (NA1), CD32, CD64, NKG2D, and NKp46 expressed on the surface of CHO cells. CHO cells were incubated with the indicated concentrations of antibodies. Cell bound antibodies were detected via incubation with FITC-labeled secondary antibodies and flow cytometric analysis. The assays were performed in two biological replicates, of which one representative graph is shown. Control (ctrl) antibodies for the respective receptors have been included: mAb anti-CD16 (anti-human CD16A and CD16B), mAb anti-human CD32, and mAb anti-CD64 as well as mAb anti-CD355 (NKp46) and mAb anti-CD314 (NKG2D).

[0027] FIG. 20 Exemplary binding of trispecific molecules CD19/CD16A/NKG2D 2tascFv-AFc-2, CD19/CD16A/NKG2D 2Fab-scFc-1scDb-2, CD19/CD16A/NKp46 2Fab-scFc-1scDb-4, CD19/Fc/NKp46 1Fab-AFc-1Fab-1, and CD19/Fc-enhanced Fc/NKp46 1Fab-AFc-1Fab-6 to recombinant human CD16A (158F), CD16B (NA1), CD32, CD64, NKG2D, and NKp46 expressed on the surface of CHO cells. CHO cells were incubated with the indicated concentrations of antibodies. Cell bound antibodies were detected via incubation with FITC-labeled secondary antibodies and flow cytometric analysis. The assays were performed in two biological replicates, of which one representative graph is shown. Control (ctrl) antibodies for the respective receptors have been included: mAb anti-CD16 (anti-human CD16A and CD16B), mAb anti-human CD32, and mAb anti-CD64 as well as mAb anti-CD355 (NKp46) and mAb anti-CD314 (NKG2D).

[0028] FIG. 21 4 h calcein-release cytotoxicity assays with calcein-labeled NK cells as target cells and autologous NK cells as effector cells to assess concentration-dependent NK cell fratricide induced by trispecific antibody constructs. IG-scDb, 1Fab-1scDb-AFc, AIG-2scFv, and scFv-IgAb (A), 1scDb-1scFv-AFc, 2Fab-scFc-1scDb, and 1Fab-AFc-1Fab (B), 2Fab-1scFv-AFc, 2Fab-1scDb-AFc, AIG-1scDb-AFc, and AIG-1scDb (C), 1tascFv-1scFv-AFc, 2scDb-AFc, 2Fab-scFc-1scFv, and AIG-1scFv (D). Anti-CD38 IgG1 (IgAb-51) was used as a positive control in all assays. Mean and SD of duplicate lysis values are plotted.

[0029] FIG. 22 4 h calcein-release cytotoxicity assays with calcein-labeled THP-1 target cells and enriched primary human NK cells as effector cells at an E:T ratio of 5:1 in the presence of serial dilutions of 2Fab-1scDb-AFc (A), 2scDb-AFc, 1scDb-1scFv-AFc, 2tascFv-AFc, and 2Fab-scFc-1scDb (B), AIG-2scFv and AIG-2scDb (C), 2Fab-scFc-1scFv and 1Fab-AFc-1Fab (D), 2Fab-1scDb-AFc, 2Fab-1scFv-AFc, and 1Fab-1scDb-AFc (E), and IG-scDb and scFv-IgAb (F). Anti-CD16A IgG1 (IgAb-50) was used as a positive control in all assays. As a negative control (ctrl) target cells were incubated with NK cells without (w/o) antibodies on each plate. Mean and SD of duplicate lysis values are plotted.

[0030] FIG. 23 Concentration-dependent induction of tumor cell lysis by trispecific antibody constructs using PBMCs as effector cells in 4 h calcein-release cytotoxicity assays. Calcein-labeled CD19⁺ GRANTA-519 target cells were incubated with human PBMC as effector cells at an E:T ratio of 50:1 in the presence of serial dilutions of the respective antibodies in duplicates. Fc-enhanced anti-CD19 IgG1 (IgAb-67) was used as a positive control, and target and effector cells without (w/o) antibodies were used as a negative control (ctrl). Mean lysis values and error bars indicate the standard deviation (SD). The experiments were carried out in biological duplicates and one representative resulting diagram is shown.

[0031] FIG. 24 Size-related heterogeneities analyzed under native conditions by SE-HPLC. (A) 2Fab-1Fab-1scDb-AFc-1; (B) 2tascFv-AFc-2; (C) AIG-2scFv-18; (D) IG-scDb-1; (E) 2Fab-scFc-1scDb-1; (F) 1Fab-AFc-1Fab-1 (ComparatorA_1)

[0032] FIG. 25 Size-related heterogeneities analyzed under denaturing, non-reducing (nR) or reducing (R) conditions by SDS-PAGE. (A) 2Fab-1Fab-1scDb-AFc-1; (B) 2tascFv-AFc-2; (C) AIG-2scFv-18; D IG-scDb-1; (E) 2Fab-scFc-1scDb-1; (F) 1Fab-AFc-1Fab-1 (ComparatorA_1)

[0033] FIG. 26 Induction of ADCP by HER2/CD16A/CD89 trispecific antibody constructs. CMFDA-labeled SK-BR-3 target cells were co-cultured for 4 h with macrophages at an E:T ratio of 1:1 in the presence of serial dilutions of trispecific HER2/CD16A/CD89 constructs AIG-2scFv-28 and AIG-1scDb-1scFv-5 or bispecific HER2/CD16A constructs AIG-1scFv-2 and AIG-1scDb-9, or without (w/o) antibody in two independent experiments (Experiment 1: A, C; Experiment 2: B, D). After incubation CD11b⁺/CMFDA⁺ phagocytic events and remaining viable CD11b⁻/CMFDA⁺ target cells were quantified by flow cytometry, and fold change in phagocytosis (A, B) and target cell depletion (C, D) were calculated using samples without (w/o) antibodies as a reference (=1). Mean and SD of duplicate values are plotted.

[0034] FIG. 27 4 h cytotoxicity assays with HER2⁺ SK-BR-3 target cells and neutrophils as effector cells in the presence of HER2/CD16A/CD89 trispecific antibody constructs. Calcein-labeled SK-BR-3 target cells were co-cultured with primary human neutrophils at the indicated E:T ratios in the presence of 3 μg/mL HER2/CD16A/CD89 constructs AIG-2scFv-28 and AIG-1scDb-1scFv-5 or HER2/CD16A constructs AIG-1scFv-2 and AIG-1scDb-9, or without (w/o) antibody. Mean and SD of duplicate lysis values are plotted.

[0035] FIG. 28 Structure information and description of trispecific molecules.

### DEFINITIONS

[0036] The term “binding domain” characterizes in connection with the present invention a domain which is capable of specifically binding to/interacting with/recognizing a given target epitope or a given target site on the target molecules (antigens), e.g. CD16A, e.g. another antigen on the surface of an immune effector cell, and/or e.g. a target cell surface antigen, respectively. The structure and/or function of the first binding domain (recognizing e.g. CD16A), the structure and/or function of the second binding domain (recognizing e.g. another antigen on the surface of an immune effector cell), and also the structure and/or function of the third binding domain (recognizing the target cell surface antigen), is/are preferably based on the structure and/or function of an antibody, e.g. of a full-length or whole immunoglobulin molecule and/or is/are drawn from the variable heavy chain (VH) and/or variable light chain (VL) domains of an antibody or fragment thereof.

[0037] The term “specifically binding”, as used herein means that the binding domain preferentially binds or recognizes the target even when the binding partner is present in a mixture of other molecules or other structures. The binding may be mediated by covalent or non-covalent interactions or a combination of both. In preferred embodiments, “simultaneous binding to a target cell and a immune effector cell” comprises the physical interaction between the binding domains and their targets on the cells, but preferably also includes the induction of an action mediated by the simultaneous binding of the two cells. Such an action may be an immune effector function of the immune effector cell, such as a cytotoxic effect.

[0038] The term “antibody construct” refers to a molecule in which the structure and/or function is/are based on the structure and/or function of an antibody, e.g., of a full-length or whole immunoglobulin molecule and/or is/are drawn from the variable heavy chain (VH) and/or variable light chain (VL) domains of an antibody or fragment thereof. An antibody construct is hence capable of binding to its specific target or antigen. Furthermore, the binding region of an antibody construct defined in the context of the invention comprises the minimum structural requirements of an antibody which allow for the target binding. This minimum requirement may e.g. be defined by the presence of at least the three light chain CDRs (i.e. CDR1, CDR2 and CDR3 of the VL region) and/or the three heavy chain CDRs (i.e. CDR1, CDR2 and CDR3 of the VH region), preferably of all six CDRs. An alternative approach to define the minimal structure requirements of an antibody is the definition of the epitope of the antibody within the structure of the specific target, respectively, the protein domain of the target protein composing the epitope region (epitope cluster) or by reference to a specific antibody competing with the epitope of the defined antibody. The antibodies on which the constructs defined in the context of the invention are based include for example monoclonal, recombinant, chimeric, deimmunized, humanized and human antibodies.

[0039] The binding region of an antibody construct defined in the context of the invention may e.g. comprise the above referred groups of CDRs. Preferably, those CDRs are comprised in the framework of an antibody light chain variable region (VL) and an antibody heavy chain variable region (VH); however, it does not have to comprise both. Fd fragments, for example, have two VH regions and often retain some antigen-binding function of the intact antigen-binding region. Additional examples for the format of antibody fragments, antibody variants or binding domains include (1) a Fab fragment, a monovalent fragment having the VL, VH, CL and CH1 domains; (2) a F(ab′)₂ fragment, a bivalent fragment having two Fab fragments linked by a disulfide bridge at the hinge domain; (3) an Fd fragment having the two VH and CH1 domains; (4) an Fv fragment having the VL and VH domains of a single arm of an antibody, (5) a dAb fragment (Ward et al., (1989) Nature 341:544-546), which has a VH domain; (6) an isolated complementarity determining region (CDR), and (7) a single chain Fv (scFv), the latter being preferred (for example, derived from an scFv-library).

[0040] An antibody construct as defined in the context of the invention may comprise a fragment of a full-length antibody, such as VH, VHH, VL, (s)dAb, Fv, Fd, Fab, Fab′, F(ab′)₂ or “r IgG” (“half antibody”). Antibody constructs as defined in the context of the invention may also comprise modified fragments of antibodies, also called antibody variants, such as scFv, di-scFv or bi(s)-scFv, scFv-Fc, scFv-zipper, scFab, Fab₂, Fab₃, diabodies, single chain diabodies, tandem diabodies (Tandab's), tandem di-scFv, tandem tri-scFv, “multibodies” such as triabodies or tetrabodies, and single domain antibodies such as nanobodies or single variable domain antibodies comprising merely one variable domain, which might be VHH, VH or VL, that specifically bind an antigen or epitope independently of other V regions or domains.

[0041] As used herein, the terms “single-chain Fv,” “single-chain antibodies” or “scFv” refer to single polypeptide chain antibody fragments that comprise the variable regions from both the heavy and light chains, but lack the constant regions. Generally, a single-chain antibody further comprises a polypeptide linker between the VH and VL domains which enables it to form the desired structure which would allow for antigen binding. A preferred linker for this purpose is a glycine serine linker, which preferably comprises from about 15 to about 30 amino acids. Preferred glycine serine linkers may have one or more repeats of GGS, GGGS (SEQ ID NO: 451), or GGGGS (SEQ ID NO: 84). Such linker preferably comprises 5, 6, 7, 8, 9 and/or 10 repeats of GGS, preferably (GGS)₆ (SEQ ID NO 82) (which are preferably used for scFvs having the arrangement VH-VL), or preferably (GGS)₇ (SEQ ID NO: 83) (which are preferably used for scFvs having the arrangement VL-VH). Single chain antibodies are discussed in detail by Plueckthun in The Pharmacology of Monoclonal Antibodies, vol. 1 13, Rosenburg and Moore eds. Springer-Verlag, New York, pp. 269-315 (1994). Various methods of generating single chain antibodies are known, including those described in U.S. Pat. Nos. 4,694,778 and 5,260,203; International Patent Application Publication No. WO 88/01649; Bird (1988) Science 242:423-442; Huston et al. (1988) Proc. Natl. Acad. Sci. USA 85:5879-5883; Ward et al. (1989) Nature 334:54454; Skerra et al. (1988) Science 242:1038-1041. In specific embodiments, single-chain antibodies can also be bispecific, multispecific, human, and/or humanized and/or synthetic. The term “bi-scFv” or “ta-scFv” (tandem scFv) as used herein refers to two scFv that are fused together. Such a bi-scFv or ta-scFv may comprise a linker between the two scFv moieties. Generally, the arrangement of the VH and VL domains on the polypeptide chain within each of the scFv may be in any order. This means that the “bi-scFv” of “ta-scFv” can be arranged in the order VH(1)-VL(1)-VH(2)-VL(2), VL(1)-VH(1)-VH(2)-VL(2), VH(1)-VL(1)-VL(2)-VH(2), or VL(1)-VH(1)-VL(2)-VH(2), where (1) and (2) stand for the first and second scFv, respectively.

[0042] The term “double Fab” as used herein refers to two Fab fragments that are fused together, which are preferably staggered. Here, a first chain of a first Fab is N-terminally fused to a first chain of a second Fab, or a second chain of a first Fab is N-terminally fused to a second chain of a second Fab, or both, the first chain of a first Fab and the second chain of a first Fab are fused to first and second chains of a second Fab, respectively. A linker may be present between the fused chains of the first and second Fab. The first and second chains of the first and second Fab can be individually selected from a light chain-derived chain of a Fab (VL-CL), a heavy chain derived chain of a Fab (VH-CH1), as long as each Fab contains a VH, a VL, a CH1, and a CL. As an illustrative example, the light chain-derived chain of the first Fab can be fused to the light chain derived-chain of the second Fab. As another illustrative example, the heavy chain-derived chain of the first Fab can be fused to the heavy chain derived-chain of the second Fab. As a further illustrative example, the heavy chain-derived chain of the first Fab can be fused to the light chain derived-chain of the second Fab. In some double Fabs, both chains of the two Fabs are fused together. For example, the light chain-derived chain of the first Fab can be fused to the light chain derived-chain of the second Fab while the heavy chain-derived chain of the first Fab can be fused to the heavy chain derived-chain of the second Fab. Alternatively, the light chain-derived chain of the first Fab can be fused to the heavy chain derived-chain of the second Fab while the heavy chain-derived chain of the first Fab can be fused to the light chain derived-chain of the second Fab. A fusion of two Fab chains may optionally comprise a linker. Suitable and preferred linkers comprise the upper hinge sequence (SEQ ID NO: 89) or glycine serine linkers with about up to 20 amino acids, preferably up to 10 amino acids, or most preferably 10 amino acids, e.g. two repeats of GGGGS (SEQ ID NO: 84). Glycine serine linkers comprised in a double Fab may have one or more repeats of GGS, GGGS (SEQ ID NO: 451), or GGGGS (SEQ ID NO: 84), such as one, two, three, or four repeats.

[0043] As used herein, a “diabody” or “db” refers to an antibody construct comprising two binding domains, which may be constructed using heavy and light chains disclosed herein, as well as by using individual CDR regions disclosed herein. Typically, a diabody comprise a heavy chain variable domain (VH) connected to a light chain variable domain (VL) by a linker which is too short to allow pairing between the two domains on the same chain. Preferred linkers for this purpose include glycine serine linkers with about up to 12 amino acids, preferably up to about 10 amino acids. Preferred glycine serine linkers may have one or more repeats of GGS, GGGS (SEQ ID NO: 451), or GGGGS (SEQ ID NO: 84). A preferred linker is (GGS)₂ SEQ ID NO: (80). Another preferred linker is (GGS)₃ SEQ ID NO: (81). Accordingly, the VH and VL domains of one fragment are forced to pair with the complementary VH and VL domains of another fragment, thereby forming two antigen-binding sites. A diabody can be formed by two separate polypeptide chains, each comprising a VH and a VL. Alternatively, all four variable domains can be comprised in one single polypeptide chain comprising two VH and two VL domains. In such a case, the diabody can also be termed “single chain diabody” or “scDb”. Typically, a scDb comprises the two chains of a non-single chain diabody that are fused together, preferably via a linker. A preferred linker for this purpose is a glycine serine linker, which preferably comprises from about 15 to about 30 amino acids. Preferred glycine serine linkers may have one or more repeats of GGS, GGGS (SEQ ID NO: 451), or GGGGS (SEQ ID NO: 84). Such linker preferably comprises 5, 6, 7, 8, 9, and/or 10 repeats of GGS, preferably (GGS)₆, (SEQ ID NO 82) or preferably (GGS)₇ (SEQ ID NO: 83). On the polypeptide chain, the variable domains of a scDb can be arranged (from N to C terminus) in a VL-VH-VL-VH or VH-VL-VH-VL order. Similarly, the spatial arrangement of the four domains in the tertiary/quaternary structure can be in a VL-VH-VL-VH or VH-VL-VH-VL order. The term diabody does not exclude the fusion of further binding domains to the diabody.

[0044] Furthermore, the definition of the term “antibody construct” includes monovalent, bivalent and polyvalent/multivalent constructs and, thus, bispecific constructs, specifically binding to only two antigenic structure, as well as polyspecific/multispecific constructs, which specifically bind more than two antigenic structures, e.g. three, four or more, through distinct binding domains. Moreover, the definition of the term “antibody construct” includes molecules consisting of only one polypeptide chain as well as molecules consisting of more than one polypeptide chain, which chains can be either identical (homodimers, homotrimers or homo oligomers) or different (heterodimer, heterotrimer or heterooligomer). Examples for the above identified antibodies and variants or derivatives thereof are described inter alia in Harlow and Lane, Antibodies a laboratory manual, CSHL Press (1988) and Using Antibodies: a laboratory manual, CSHL Press (1999), Kontermann and Dubel, Antibody Engineering, Springer, 2nd ed. 2010 and Little, Recombinant Antibodies for Immunotherapy, Cambridge University Press 2009.

[0045] The term “valent” denotes the presence of a determined number of antigen-binding domains in the antigen-binding protein. A natural IgG has two antigen-binding domains and is bivalent. The antigen-binding proteins as defined in the context of the invention are at least trivalent. Examples of tetra-, penta- and hexavalent antigen-binding proteins are described herein.

[0046] The term “trispecific” as used herein refers to an antibody construct which is “at least trispecific”, i.e., it comprises at least a first binding domain, a second binding domain, and a third binding domain, wherein the first binding domain binds to one antigen or target (here: CD16a), the second binding domain binds to another antigen or target (here: an antigen on the surface of an immune effector cell) which is not CD16A, and the third binding domain binds to another antigen or target (here: the target cell surface antigen) which is not CD16A. Accordingly, antibody constructs as defined in the context of the invention comprise specificities for at least three different antigens or targets. For example, the first binding domain does preferably bind to an extracellular epitope of an NK cell receptor of one or more of the species selected from human, Macaca spec. and rodent species.

[0047] “CD16A” or “CD16a” refers to the activating receptor CD16A, also known as FcγRIIIA, expressed on the cell surface of NK cells. CD16A is an activating receptor triggering the cytotoxic activity of NK cells. The amino acid sequence of human CD16A is given in UniProt entry P08637 (version 212 of 12 Aug. 2020) as well as in SEQ ID NO: 449. The affinity of antibodies for CD16A directly correlates with their ability to trigger NK cell activation, thus higher affinity towards CD16A reduces the antibody dose required for activation. The antigen-binding site of the antigen-binding protein binds to CD16A, but preferably not to CD16B. For example, an antigen-binding site comprising heavy (VH) and light (VL) chain variable domains binding to CD16A, but not binding to CD16B, may be provided by an antigen-binding site which specifically binds to an epitope of CD16A which comprises amino acid residues of the C-terminal sequence SFFPPGYQ (positions 201-208 of SEQ ID NO:449) and/or residues G147 and/or Y158 of CD16A which are not present in CD16B.

[0048] “CD16B” refers to receptor CD16B, also known as FcγRIIIB, expressed on neutrophils and eosinophils. The receptor is glycosylphosphatidyl inositol (GPI) anchored and is understood to not trigger any kind of cytotoxic activity of CD16B positives immune cells.

[0049] The term “target cell” describes a cell or a group of cells, which is/are the target of the mode of action applied by the antibody construct of the invention. This cell/group of cells comprise e.g. pathological cells, which are eliminated or inhibited by engaging these cells with the effector cell via the antibody construct of the invention. A preferred target cell is a cancer cell.

[0050] The term “target cell surface antigen” refers to an antigenic structure expressed by a cell and which is present at the cell surface such that it is accessible for an antibody construct as described herein. It may be a protein, preferably the extracellular portion of a protein, a peptide that is presented on the cell surface in an MHC context (including HLA-A2, HLA-All, HLA-A24, HLA-B44, HLA-C4) or a carbohydrate structure, preferably a carbohydrate structure of a protein, such as a glycoprotein. It is preferably a tumor associated or tumor restricted antigen. It is envisaged that CD16A is not a target cell surface antigen of the present invention.

[0051] The term “antibody construct” of the invention is at least trispecific but may encompass further specificities resulting in multispecific antibody constructs such as tetraspecific antibody constructs, the latter ones including four or more binding domains, or constructs having more than four (e.g. five, six . . . ) specificities. It is however envisaged, that also in these multispecific constructs it is only the first binding domain, which is CD16A specific. Examples for tri- or multispecific antibody constructs are provided e.g. in WO 2015/158636, WO 2017/064221, WO/2019/198051, and Ellwanger et a. (MAbs. 2019 July; 11(5):899-918).

[0052] Given that the antibody constructs as defined in the context of the invention are (at least) trispecific, they do not occur naturally and they are markedly different from naturally occurring products. A “trispecific” antibody construct is hence an artificial hybrid antibody having at least three distinct binding sides with different specificities. Trispecific antibody constructs can be produced by a variety of methods including fusion of hybridomas or linking of Fab′ fragments. See, e.g., Songsivilai & Lachmann, Clin. Exp. Immunol. 79:315-321 (1990).

[0053] The binding domains and the variable domains (VH/VL) of the antibody construct of the present invention may or may not comprise peptide linkers (spacer peptides). The term “peptide linker” comprises in accordance with the present invention an amino acid sequence by which the amino acid sequences of one (variable and/or binding) domain and another (variable and/or binding) domain of the antibody construct defined herein are linked with each other. The peptide linkers can also be used to fuse one domain to another domain of the antibody construct defined herein. In such cases, the peptide linker may also be referred to as a “connector”. Such a connector is preferably a short linker, which preferably has a length of about 10 nm or less, preferably about 9 nm or less, preferably about 8 nm or less, preferably about 7 nm or less, preferably about 6 nm or less, preferably about 5 nm or less, preferably about 4 nm or less, or even less. The length of the linker is preferably determined as described by Rossmalen et al Biochemistry 2017, 56, 6565-6574, which also describes suitable linkers that are well known to the skilled person. An example for a connector is a glycine serine linker or a serine linker, which preferably comprise no more than about 75 amino acids, preferably not more than about 50 amino acids. In illustrative examples, a suitable linker comprises one or more (e.g. 1, 2, 3, 4, 5, 6, 7, or 8) GGGGS sequences (SEQ ID NO: 84), such as (GGGGS)₂ (SEQ ID NO: 85), (GGGGS)₄ (SEQ ID NO: 86), or preferably (GGGGS)₆ (SEQ ID NO: 87). Other illustrative examples for linkers are shown in SEQ ID NOs: 80-83. A preferred technical feature of such peptide linker is that it does not comprise any polymerization activity.

[0054] The antibody constructs as defined in the context of the invention are preferably “in vitro generated antibody constructs”. This term refers to an antibody construct according to the above definition where all or part of the variable region (e.g., at least one CDR) is generated in a non-immune cell selection, e.g., an in vitro phage display, protein chip or any other method in which candidate sequences can be tested for their ability to bind to an antigen. This term thus preferably excludes sequences generated solely by genomic rearrangement in an immune cell in an animal. A “recombinant antibody” is an antibody made through the use of recombinant DNA technology or genetic engineering.

[0055] The term “monoclonal antibody” (mAb) or monoclonal antibody construct as used herein refers to an antibody obtained from a population of substantially homogeneous antibodies, i.e., the individual antibodies comprising the population are identical except for possible naturally occurring mutations and/or post-translation modifications (e.g., isomerizations, amidations) that may be present in minor amounts. Monoclonal antibodies are highly specific, being directed against a single antigenic side or determinant on the antigen, in contrast to conventional (polyclonal) antibody preparations which typically include different antibodies directed against different determinants (or epitopes). In addition to their specificity, the monoclonal antibodies are advantageous in that they are synthesized by the hybridoma culture, hence uncontaminated by other immunoglobulins. The modifier “monoclonal” indicates the character of the antibody as being obtained from a substantially homogeneous population of antibodies, and is not to be construed as requiring production of the antibody by any particular method.

[0056] For the preparation of monoclonal antibodies, any technique providing antibodies produced by continuous cell line cultures can be used. For example, monoclonal antibodies to be used may be made by the hybridoma method first described by Koehler et al., Nature, 256: 495 (1975), or may be made by recombinant DNA methods (see, e.g., U.S. Pat. No. 4,816,567). Examples for further techniques to produce human monoclonal antibodies include the trioma technique, the human B-cell hybridoma technique (Kozbor, Immunology Today 4 (1983), 72) and the EBV-hybridoma technique (Cole et al., Monoclonal Antibodies and Cancer Therapy, Alan R. Liss, Inc. (1985), 77-96).

[0057] Hybridomas can then be screened using standard methods, such as enzyme-linked immunosorbent assay (ELISA) and surface plasmon resonance (BIACORE™) analysis, to identify one or more hybridomas that produce an antibody that specifically binds with a specified antigen. Any form of the relevant antigen may be used as the immunogen, e.g., recombinant antigen, naturally occurring forms, any variants or fragments thereof, as well as an antigenic peptide thereof. Surface plasmon resonance as employed in the BIAcore system can be used to increase the efficiency of phage antibodies which bind to an epitope of a target cell surface antigen, (Schier, Human Antibodies Hybridomas 7 (1996), 97-105; Malmborg, J. Immunol. Methods 183 (1995), 7-13). Another exemplary method of making monoclonal antibodies includes screening protein expression libraries, e.g., phage display or ribosome display libraries. Phage display is described, for example, in Ladner et al., U.S. Pat. No. 5,223,409; Smith (1985) Science 228:1315-1317, Clackson et ai, Nature, 352: 624-628 (1991) and Marks et al., J. Mol. Biol., 222: 581-597 (1991).

[0058] In addition to the use of display libraries, the relevant antigen can be used to immunize a non-human animal, e.g., a rodent (such as a mouse, hamster, rabbit or rat). In one embodiment, the non-human animal includes at least a part of a human immunoglobulin gene. For example, it is possible to engineer mouse strains deficient in mouse antibody production with large fragments of the human Ig (immunoglobulin) loci. Using the hybridoma technology, antigen-specific monoclonal antibodies derived from the genes with the desired specificity may be produced and selected. See, e.g., XENOMOUSE™, Green et al. (1994) Nature Genetics 7:13-21, US 2003-0070185, WO 96/34096, and WO 96/33735.

[0059] A monoclonal antibody can also be obtained from a non-human animal, and then modified, e.g., humanized, deimmunized, rendered chimeric etc., using recombinant DNA techniques known in the art. Examples of modified antibody constructs include humanized variants of non-human antibodies, “affinity matured” antibodies (see, e.g. Hawkins et al. J. Mol. Biol. 254, 889-896 (1992) and Lowman et al., Biochemistry 30, 10832-10837 (1991)) and antibody mutants with altered effector function(s) (see, e.g., U.S. Pat. No. 5,648,260, Kontermann and Dubel (2010), loc. cit. and Little (2009), loc. cit).

[0060] In immunology, affinity maturation is the process by which B cells produce antibodies with increased affinity for antigen during the course of an immune response. With repeated exposures to the same antigen, a host will produce antibodies of successively greater affinities. Like the natural prototype, the in vitro affinity maturation is based on the principles of mutation and selection. The in vitro affinity maturation has successfully been used to optimize antibodies, antibody constructs, and antibody fragments. Random mutations inside the CDRs are introduced using radiation, chemical mutagens or error-prone PCR. In addition, the genetic diversity can be increased by chain shuffling. Two or three rounds of mutation and selection using display methods like phage display usually results in antibody fragments with affinities in the low nanomolar range.

[0061] A preferred type of an amino acid substitutional variation of the antibody constructs involves substituting one or more hypervariable region residues of a parent antibody (e. g. a humanized or human antibody). Generally, the resulting variant(s) selected for further development will have improved biological properties relative to the parent antibody from which they are generated. A convenient way for generating such substitutional variants involves affinity maturation using phage display. Briefly, several hypervariable region sides (e. g. 6-7 sides) are mutated to generate all possible amino acid substitutions at each side. The antibody variants thus generated are displayed in a monovalent fashion from filamentous phage particles as fusions to the gene III product of M13 packaged within each particle. The phage-displayed variants are then screened for their biological activity (e. g. binding affinity) as herein disclosed. In order to identify candidate hypervariable region sides for modification, alanine scanning mutagenesis can be performed to identify hypervariable region residues contributing significantly to antigen binding. Alternatively, or additionally, it may be beneficial to analyze a crystal structure of the antigen-antibody complex to identify contact points between the binding domain and, e.g., human target cell surface antigen. Such contact residues and neighboring residues are candidates for substitution according to the techniques elaborated herein. Once such variants are generated, the panel of variants is subjected to screening as described herein and antibodies with superior properties in one or more relevant assays may be selected for further development.

[0062] The monoclonal antibodies and antibody constructs of the present disclosure specifically include “chimeric” antibodies (immunoglobulins) in which a portion of the heavy and/or light chain is identical with or homologous to corresponding sequences in antibodies derived from a particular species or belonging to a particular antibody class or subclass, while the remainder of the chain(s) is/are identical with or homologous to corresponding sequences in antibodies derived from another species or belonging to another antibody class or subclass, as well as fragments of such antibodies, so long as they exhibit the desired biological activity (U.S. Pat. No. 4,816,567; Morrison et al., Proc. Natl. Acad. Sci. USA, 81: 6851-6855 (1984)). Chimeric antibodies of interest herein include “primitized” antibodies comprising variable domain antigen-binding sequences derived from a non-human primate (e.g., Old World Monkey, Ape etc.) and human constant region sequences. A variety of approaches for making chimeric antibodies have been described. See e.g., Morrison et al., Proc. Natl. Acad. Sci U.S.A. 81:6851, 1985; Takeda et al., Nature 314:452, 1985, Cabilly et al., U.S. Pat. No. 4,816,567; Boss et al., U.S. Pat. No. 4,816,397; Tanaguchi et al., EP 0171496; EP 0173494; and GB 2177096.

[0063] An antibody, antibody construct, antibody fragment or antibody variant may also be modified by specific deletion of human T cell epitopes (a method called “deimmunization”) by the methods disclosed for example in WO 98/52976 or WO 00/34317. Briefly, the heavy and light chain variable domains of an antibody can be analyzed for peptides that bind to MHC class II; these peptides represent potential T cell epitopes (as defined in WO 98/52976 and WO 00/34317). For detection of potential T cell epitopes, a computer modeling approach termed “peptide threading” can be applied, and in addition a database of human MHC class II binding peptides can be searched for motifs present in the VH and VL sequences, as described in WO 98/52976 and WO 00/34317. These motifs bind to any of the 18 major MHC class II DR allotypes, and thus constitute potential T cell epitopes. Potential T cell epitopes detected can be eliminated by substituting small numbers of amino acid residues in the variable domains, or preferably, by single amino acid substitutions. Typically, conservative substitutions are made. Often, but not exclusively, an amino acid common to a position in human germline antibody sequences may be used. Human germline sequences are disclosed e.g. in Tomlinson, et al. (1992) J. Mol. Biol. 227:776-798; Cook, G. P. et al. (1995) Immunol. Today Vol. 16 (5): 237-242; and Tomlinson et al. (1995) EMBO J. 14: 14:4628-4638. The V BASE directory provides a comprehensive directory of human immunoglobulin variable region sequences (compiled by Tomlinson, L A. et al. MRC Centre for Protein Engineering, Cambridge, UK). These sequences can be used as a source of human sequence, e.g., for framework regions and CDRs. Consensus human framework regions can also be used, for example as described in U.S. Pat. No. 6,300,064.

[0064] “Humanized” antibodies, antibody constructs, variants or fragments thereof (such as Fv, Fab, Fab′, F(ab′)₂ or other antigen-binding subsequences of antibodies) are antibodies or immunoglobulins of mostly human sequences, which contain (a) minimal sequence(s) derived from non-human immunoglobulin. For the most part, humanized antibodies are human immunoglobulins (recipient antibody) in which residues from a hypervariable region (also CDR) of the recipient are replaced by residues from a hypervariable region of a non-human (e.g., rodent) species (donor antibody) such as mouse, rat, hamster or rabbit having the desired specificity, affinity, and capacity. In some instances, Fv framework region (FR) residues of the human immunoglobulin are replaced by corresponding non-human residues. Furthermore, “humanized antibodies” as used herein may also comprise residues which are found neither in the recipient antibody nor the donor antibody. These modifications are made to further refine and optimize antibody performance. The humanized antibody may also comprise at least a portion of an immunoglobulin constant region (Fc), typically that of a human immunoglobulin. For further details, see Jones et al., Nature, 321: 522-525 (1986); Reichmann et al., Nature, 332: 323-329 (1988); and Presta, Curr. Op. Struct. Biol., 2: 593-596 (1992).

[0065] Humanized antibodies or fragments thereof can be generated by replacing sequences of the Fv variable domain that are not directly involved in antigen binding with equivalent sequences from human Fv variable domains. Exemplary methods for generating humanized antibodies or fragments thereof are provided by Morrison (1985) Science 229:1202-1207; by Oi et al. (1986) BioTechniques 4:214; and by U.S. Pat. Nos. 5,585,089; 5,693,761; 5,693,762; 5,859,205; and 6,407,213. Those methods include isolating, manipulating, and expressing the nucleic acid sequences that encode all or part of immunoglobulin Fv variable domains from at least one of a heavy or light chain. Such nucleic acids may be obtained from a hybridoma producing an antibody against a predetermined target, as described above, as well as from other sources. The recombinant DNA encoding the humanized antibody molecule can then be cloned into an appropriate expression vector.

[0066] Humanized antibodies may also be produced using transgenic animals such as mice that express human heavy and light chain genes, but are incapable of expressing the endogenous mouse immunoglobulin heavy and light chain genes. Winter describes an exemplary CDR grafting method that may be used to prepare the humanized antibodies described herein (U.S. Pat. No. 5,225,539). All of the CDRs of a particular human antibody may be replaced with at least a portion of a non-human CDR, or only some of the CDRs may be replaced with non-human CDRs. It is only necessary to replace the number of CDRs required for binding of the humanized antibody to a predetermined antigen.

[0067] A humanized antibody can be optimized by the introduction of conservative substitutions, consensus sequence substitutions, germline substitutions and/or back mutations. Such altered immunoglobulin molecules can be made by any of several techniques known in the art, (e.g., Teng et al., Proc. Natl. Acad. Sci. U.S.A., 80: 7308-7312, 1983; Kozbor ei a/., Immunology Today, 4: 7279, 1983; Olsson et al., Meth. Enzymol., 92: 3-16, 1982, and EP 239 400).

[0068] The term “human antibody”, “human antibody construct” and “human binding domain” includes antibodies, antibody constructs and binding domains having antibody regions such as variable and constant regions or domains which correspond substantially to human germline immunoglobulin sequences known in the art, including, for example, those described by Kabat et al. (1991) (loc. cit.). The human antibodies, antibody constructs or binding domains as defined in the context of the invention may include amino acid residues not encoded by human germline immunoglobulin sequences (e.g., mutations introduced by random or side-specific mutagenesis in vitro or by somatic mutation in vivo), for example in the CDRs, and in particular, in CDR3. The human antibodies, antibody constructs or binding domains can have at least one, two, three, four, five, or more positions replaced with an amino acid residue that is not encoded by the human germline immunoglobulin sequence. The definition of human antibodies, antibody constructs and binding domains as used herein, however, also contemplates “fully human antibodies”, which include only non-artificially and/or genetically altered human sequences of antibodies as those can be derived by using technologies or systems such as the Xenomouse. Preferably, a “fully human antibody” does not include amino acid residues not encoded by human germline immunoglobulin sequences.

[0069] In some embodiments, the antibody constructs defined herein are “isolated” or “substantially pure” antibody constructs. “Isolated” or “substantially pure”, when used to describe the antibody constructs disclosed herein, means an antibody construct that has been identified, separated and/or recovered from a component of its production environment. Preferably, the antibody construct is free or substantially free of association with all other components from its production environment. Contaminant components of its production environment, such as that resulting from recombinant transfected cells, are materials that would typically interfere with diagnostic or therapeutic uses for the polypeptide, and may include enzymes, hormones, and other proteinaceous or non-proteinaceous solutes. The antibody constructs may e.g constitute at least about 5%, or at least about 50% by weight of the total protein in a given sample. It is understood that the isolated protein may constitute from 5% to 99.9% by weight of the total protein content, depending on the circumstances. The polypeptide may be made at a significantly higher concentration through the use of an inducible promoter or high expression promoter, such that it is made at increased concentration levels. The definition includes the production of an antibody construct in a wide variety of organisms and/or host cells that are known in the art. In preferred embodiments, the antibody construct will be purified (1) to a degree sufficient to obtain at least 15 residues of N-terminal or internal amino acid sequence by use of a spinning cup sequenator, or (2) to homogeneity by SDS-PAGE under non-reducing or reducing conditions using Coomassie blue or, preferably, silver stain. Ordinarily, however, an isolated antibody construct will be prepared by at least one purification step.

[0070] According to the present invention, binding domains are in the form of one or more polypeptides. Such polypeptides may include proteinaceous parts and non-proteinaceous parts (e.g. chemical linkers or chemical cross-linking agents such as glutaraldehyde). Proteins (including fragments thereof, preferably biologically active fragments, and peptides, usually having less than 30 amino acids) comprise two or more amino acids coupled to each other via a covalent peptide bond (resulting in a chain of amino acids).

[0071] The term “polypeptide” or “polypeptide chain” as used herein describes a group of molecules, which usually consist of more than 30 amino acids. The terms “peptide”, “polypeptide” and “protein” also refer to naturally modified peptides/polypeptides/proteins wherein the modification is affected e.g. by post-translational modifications like glycosylation, acetylation, phosphorylation and the like. A “peptide”, “polypeptide” or “protein” when referred to herein may also be chemically modified such as pegylated. Such modifications are well known in the art and described herein below. The above modifications (glycosylation, pegylation etc.) also apply to the antibody constructs of the invention.

[0072] Preferably the binding domain which binds to CD16A, the binding domain which binds to another antigen on the surface of an immune effector cell, and/or the binding domain which binds to the target cell surface antigen is/are human binding domains. Antibodies and antibody constructs comprising at least one human binding domain avoid some of the problems associated with antibodies or antibody constructs that possess non-human such as rodent (e.g. murine, rat, hamster or rabbit) variable and/or constant regions. The presence of such rodent derived proteins can lead to the rapid clearance of the antibodies or antibody constructs or can lead to the generation of an immune response against the antibody or antibody construct by a patient. In order to avoid the use of rodent derived antibodies or antibody constructs, human or fully human antibodies/antibody constructs can be generated through the introduction of human antibody function into a rodent so that the rodent produces fully human antibodies.

[0073] The ability to clone and reconstruct megabase-sized human loci in YACs and to introduce them into the mouse germline provides a powerful approach to elucidating the functional components of very large or crudely mapped loci as well as generating useful models of human disease. Furthermore, the use of such technology for substitution of mouse loci with their human equivalents could provide unique insights into the expression and regulation of human gene products during development, their communication with other systems, and their involvement in disease induction and progression.

[0074] An important practical application of such a strategy is the “humanization” of the mouse humoral immune system. Introduction of human immunoglobulin (Ig) loci into mice in which the endogenous Ig genes have been inactivated offers the opportunity to study the mechanisms underlying programmed expression and assembly of antibodies as well as their role in B-cell development. Furthermore, such a strategy could provide an ideal source for production of fully human monoclonal antibodies (mAbs)—an important milestone towards fulfilling the promise of antibody therapy in human disease. Fully human antibodies or antibody constructs are expected to minimize the immunogenic and allergic responses intrinsic to mouse or mouse-derivatized mAbs and thus to increase the efficacy and safety of the administered antibodies/antibody constructs. The use of fully human antibodies or antibody constructs can be expected to provide a substantial advantage in the treatment of chronic and recurring human diseases, such as inflammation, autoimmunity, and cancer, which require repeated compound administrations.

[0075] One approach towards this goal was to engineer mouse strains deficient in mouse antibody production with large fragments of the human Ig loci in anticipation that such mice would produce a large repertoire of human antibodies in the absence of mouse antibodies. Large human Ig fragments would preserve the large variable gene diversity as well as the proper regulation of antibody production and expression. By exploiting the mouse machinery for antibody diversification and selection and the lack of immunological tolerance to human proteins, the reproduced human antibody repertoire in these mouse strains should yield high affinity antibodies against any antigen of interest, including human antigens. Using the hybridoma technology, antigen-specific human mAbs with the desired specificity could be readily produced and selected. This general strategy was demonstrated in connection with the generation of the first XenoMouse mouse strains (see Green et al. Nature Genetics 7:13-21 (1994)). The XenoMouse strains were engineered with yeast artificial chromosomes (YACs) containing 245 kb and 190 kb-sized germline configuration fragments of the human heavy chain locus and kappa light chain locus, respectively, which contained core variable and constant region sequences. The human Ig containing YACs proved to be compatible with the mouse system for both rearrangement and expression of antibodies and were capable of substituting for the inactivated mouse Ig genes. This was demonstrated by their ability to induce B cell development, to produce an adult-like human repertoire of fully human antibodies, and to generate antigen-specific human mAbs. These results also suggested that introduction of larger portions of the human Ig loci containing greater numbers of V genes, additional regulatory elements, and human Ig constant regions might recapitulate substantially the full repertoire that is characteristic of the human humoral response to infection and immunization. The work of Green et al. was recently extended to the introduction of greater than approximately 80% of the human antibody repertoire through introduction of megabase sized, germline configuration YAC fragments of the human heavy chain loci and kappa light chain loci, respectively. See Mendez et al. Nature Genetics 15:146-156 (1997) and U.S. patent application Ser. No. 08/759,620.

[0076] The production of the XenoMouse mice is further discussed and delineated in U.S. patent application Ser. No. 07/466,008, Ser. No. 07/610,515, Ser. No. 07/919,297, Ser. No. 07/922,649, Ser. No. 08/031,801, Ser. No. 08/112,848, Ser. No. 08/234,145, Ser. No. 08/376,279, Ser. No. 08/430,938, Ser. No. 08/464,584, Ser. No. 08/464,582, Ser. No. 08/463,191, Ser. No. 08/462,837, Ser. No. 08/486,853, Ser. No. 08/486,857, Ser. No. 08/486,859, Ser. No. 08/462,513, Ser. No. 08/724,752, and Ser. No. 08/759,620; and U.S. Pat. Nos. 6,162,963; 6,150,584; 6,114,598; 6,075,181, and 5,939,598 and Japanese Patent Nos. 3 068 180 B2, 3 068 506 B2, and 3 068 507 B2. See also Mendez et al. Nature Genetics 15:146-156 (1997) and Green and Jakobovits J. Exp. Med. 188:483-495 (1998), EP 0 463 151 B1, WO 94/02602, WO 96/34096, WO 98/24893, WO 00/76310, and WO 03/47336.

[0077] In an alternative approach, others, including GenPharm International, Inc., have utilized a “minilocus” approach. In the minilocus approach, an exogenous Ig locus is mimicked through the inclusion of pieces (individual genes) from the Ig locus. Thus, one or more VH genes, one or more DH genes, one or more JH genes, a mu constant region, and a second constant region (preferably a gamma constant region) are formed into a construct for insertion into an animal. This approach is described in U.S. Pat. No. 5,545,807 to Surani et al. and U.S. Pat. Nos. 5,545,806; 5,625,825; 5,625,126; 5,633,425; 5,661,016; 5,770,429; 5,789,650; 5,814,318; 5,877,397; 5,874,299; and 6,255,458 each to Lonberg and Kay, U.S. Pat. Nos. 5,591,669 and 6,023,010 to Krimpenfort and Berns, U.S. Pat. Nos. 5,612,205; 5,721,367; and 5,789,215 to Berns et al., and U.S. Pat. No. 5,643,763 to Choi and Dunn, and GenPharm International U.S. patent application Ser. No. 07/574,748, Ser. No. 07/575,962, Ser. No. 07/810,279, Ser. No. 07/853,408, Ser. No. 07/904,068, Ser. No. 07/990,860, Ser. No. 08/053,131, Ser. No. 08/096,762, Ser. No. 08/155,301, Ser. No. 08/161,739, Ser. No. 08/165,699, Ser. No. 08/209,741. See also EP 0 546 073 B1, WO 92/03918, WO 92/22645, WO 92/22647, WO 92/22670, WO 93/12227, WO 94/00569, WO 94/25585, WO 96/14436, WO 97/13852, and WO 98/24884 and U.S. Pat. No. 5,981,175. See further Taylor et al. (1992), Chen et al. (1993), Tuaillon et al. (1993), Choi et al. (1993), Lonberg et al. (1994), Taylor et al. (1994), and Tuaillon et al. (1995), Fishwild et al. (1996).

[0078] Kirin has also demonstrated the generation of human antibodies from mice in which, through microcell fusion, large pieces of chromosomes, or entire chromosomes, have been introduced. See European Patent Application Nos. 773 288 and 843 961. Xenerex Biosciences is developing a technology for the potential generation of human antibodies. In this technology, SCID mice are reconstituted with human lymphatic cells, e.g., B and/or T cells. Mice are then immunized with an antigen and can generate an immune response against the antigen. See U.S. Pat. Nos. 5,476,996; 5,698,767; and 5,958,765.

[0079] Human anti-mouse antibody (HAMA) responses have led the industry to prepare chimeric or otherwise humanized antibodies. It is however expected that certain human anti-chimeric antibody (HACA) responses will be observed, particularly in chronic or multi-dose utilizations of the antibody. Thus, it would be desirable to provide antibody constructs comprising a human binding domain against the target cell surface antigen and a human binding domain against CD16 in order to vitiate concerns and/or effects of HAMA or HACA response.

[0080] The term “epitope” refers to a side on an antigen to which a binding domain, such as an antibody or immunoglobulin, or a derivative, fragment or variant of an antibody or an immunoglobulin, specifically binds. An “epitope” is antigenic and thus the term epitope is sometimes also referred to herein as “antigenic structure” or “antigenic determinant”. Thus, the binding domain is an “antigen interaction site”. Said binding/interaction is also understood to define a “specific recognition”.

[0081] “Epitopes” can be formed both by contiguous amino acids or non-contiguous amino acids juxtaposed by tertiary folding of a protein. A “linear epitope” is an epitope where an amino acid primary sequence comprises the recognized epitope. A linear epitope typically includes at least 3 or at least 4, and more usually, at least 5 or at least 6 or at least 7, for example, about 8 to about 10 amino acids in a unique sequence.

[0082] A “conformational epitope”, in contrast to a linear epitope, is an epitope wherein the primary sequence of the amino acids comprising the epitope is not the sole defining component of the epitope recognized (e.g., an epitope wherein the primary sequence of amino acids is not necessarily recognized by the binding domain). Typically, a conformational epitope comprises an increased number of amino acids relative to a linear epitope. With regard to recognition of conformational epitopes, the binding domain recognizes a three-dimensional structure of the antigen, preferably a peptide or protein or fragment thereof (in the context of the present invention, the antigenic structure for one of the binding domains is comprised within the target cell surface antigen protein). For example, when a protein molecule folds to form a three-dimensional structure, certain amino acids and/or the polypeptide backbone forming the conformational epitope become juxtaposed enabling the antibody to recognize the epitope. Methods of determining the conformation of epitopes include, but are not limited to, x-ray crystallography, two-dimensional nuclear magnetic resonance (2D-NMR) spectroscopy and site-directed spin labelling and electron paramagnetic resonance (EPR) spectroscopy.

[0083] The interaction between the binding domain and the epitope or the region comprising the epitope implies that a binding domain exhibits appreciable affinity for the epitope/the region comprising the epitope on a particular protein or antigen (here: e.g. CD16a, another antigen on the surface of an immune effector cell, and/or the target cell surface antigen, respectively) and, generally, does not exhibit significant reactivity with proteins or antigens other than e.g. CD16a, the other antigen on the surface of an immune effector cell, and/or the target cell surface antigen. “Appreciable affinity” includes binding with an affinity of about 10⁻⁶ M (KD) or stronger. Preferably, binding is considered specific when the binding affinity is about 10⁻² to 10⁻¹ M, 10⁻¹ to 10⁻⁹ M, 10⁻¹ to 10⁻¹ M, 10⁻¹¹ to 10⁻⁸ M, preferably of about 10⁻¹¹ to 10⁻⁹ M. Whether a binding domain specifically reacts with or binds to a target can be tested readily by, inter alia, comparing the reaction of said binding domain with a target protein or antigen with the reaction of said binding domain with proteins or antigens other than e.g. the CD16a, the another antigen on the surface of an immune effector cell, and/or the target cell surface antigen.

[0084] The term “does not essentially/substantially bind” or “is not capable of binding” means that a binding domain of the present invention does not bind a protein or antigen other e.g. the CD16a, the other antigen on the surface of an immune effector cell, and/or the target cell surface antigen, i.e., does not show reactivity of more than 30%, preferably not more than 20%, more preferably not more than 10%, particularly preferably not more than 9%, 8%, 7%, 6% or 5% with proteins or antigens other than e.g. the CD16a, the other antigen on the surface of an immune effector cell, and/or the target cell surface antigen, whereby binding to e.g. the CD16a, the other antigen on the surface of an immune effector cell, and/or the target cell surface antigen, respectively, is set to be 100%.

[0085] Specific binding is believed to be affected by specific motifs in the amino acid sequence of the binding domain and the antigen. Thus, binding is achieved as a result of their primary, secondary and/or tertiary structure as well as the result of secondary modifications of said structures. The specific interaction of the antigen-interaction-side with its specific antigen may result in a simple binding of said side to the antigen. Moreover, the specific interaction of the antigen-interaction-side with its specific antigen may alternatively or additionally result in the initiation of a signal, e.g. due to the induction of a change of the conformation of the antigen, an oligomerization of the antigen, etc.

[0086] The term “variable” refers to the portions of the antibody or immunoglobulin domains that exhibit variability in their sequence and that are involved in determining the specificity and binding affinity of a particular antibody (i.e., the “variable domain(s)”). The pairing of a variable heavy chain (VH) and a variable light chain (VL) together forms a single antigen-binding side.

[0087] Variability is not evenly distributed throughout the variable domains of antibodies; it is concentrated in sub-domains of each of the heavy and light chain variable regions. These sub-domains are called “hypervariable regions” or “complementarity determining regions” (CDRs). The more conserved (i.e., non-hypervariable) portions of the variable domains are called the “framework” regions (FRM or FR) and provide a scaffold for the six CDRs in three dimensional space to form an antigen-binding surface. The variable domains of naturally occurring heavy and light chains each comprise four FRM regions (FR1, FR2, FR3, and FR4), largely adopting a p-sheet configuration, connected by three hypervariable regions, which form loops connecting, and in some cases forming part of, the j-sheet structure. The hypervariable regions in each chain are held together in close proximity by the FRM and, with the hypervariable regions from the other chain, contribute to the formation of the antigen-binding side (see Kabat et al., loc. cit.).

[0088] The terms “CDR”, and its plural “CDRs”, refer to the complementarity determining region of which three make up the binding character of a light chain variable region (CDR-L1, CDR-L2 and CDR-L3) and three make up the binding character of a heavy chain variable region (CDR-H1, CDR-H2 and CDR-H3). CDRs contain most of the residues responsible for specific interactions of the antibody with the antigen and hence contribute to the functional activity of an antibody molecule: they are the main determinants of antigen specificity.

[0089] The exact definitional CDR boundaries and lengths are subject to different classification and numbering systems. CDRs may therefore be referred to by Kabat, Chothia, contact or any other boundary definitions, including the numbering system described herein. Despite differing boundaries, each of these systems has some degree of overlap in what constitutes the so called “hypervariable regions” within the variable sequences. CDR definitions according to these systems may therefore differ in length and boundary areas with respect to the adjacent framework region. See for example Kabat (an approach based on cross-species sequence variability), Chothia (an approach based on crystallographic studies of antigen-antibody complexes), and/or MacCallum (Kabat et al., loc. cit; Chothia et al., J. Mol. Biol, 1987, 196: 901-917; and MacCallum et al., J. Mol. Biol, 1996, 262: 732). Still another standard for characterizing the antigen binding side is the AbM definition used by Oxford Molecular's AbM antibody modeling software. See, e.g., Protein Sequence and Structure Analysis of Antibody Variable Domains. In: Antibody Engineering Lab Manual (Ed.: Duebel, S. and Kontermann, R., Springer-Verlag, Heidelberg). To the extent that two residue identification techniques define regions of overlapping, but not identical regions, they can be combined to define a hybrid CDR. However, the numbering in accordance with the so-called Kabat system is preferred.

[0090] Typically, CDRs form a loop structure that can be classified as a canonical structure. The term “canonical structure” refers to the main chain conformation that is adopted by the antigen binding (CDR) loops. From comparative structural studies, it has been found that five of the six antigen binding loops have only a limited repertoire of available conformations. Each canonical structure can be characterized by the torsion angles of the polypeptide backbone. Correspondent loops between antibodies may, therefore, have very similar three dimensional structures, despite high amino acid sequence variability in most parts of the loops (Chothia and Lesk, J. Mol. Biol., 1987, 196: 901; Chothia et al., Nature, 1989, 342: 877; Martin and Thornton, J. Mol. Biol, 1996, 263: 800). Furthermore, there is a relationship between the adopted loop structure and the amino acid sequences surrounding it. The conformation of a particular canonical class is determined by the length of the loop and the amino acid residues residing at key positions within the loop, as well as within the conserved framework (i.e., outside of the loop). Assignment to a particular canonical class can therefore be made based on the presence of these key amino acid residues.

[0091] The term “canonical structure” may also include considerations as to the linear sequence of the antibody, for example, as catalogued by Kabat (Kabat et al., loc. cit.). The Kabat numbering scheme (system) is a widely adopted standard for numbering the amino acid residues of an antibody variable domain in a consistent manner and is the preferred scheme applied in the present invention as also mentioned elsewhere herein. Additional structural considerations can also be used to determine the canonical structure of an antibody. For example, those differences not fully reflected by Kabat numbering can be described by the numbering system of Chothia et al. and/or revealed by other techniques, for example, crystallography and two- or three-dimensional computational modeling. Accordingly, a given antibody sequence may be placed into a canonical class which allows for, among other things, identifying appropriate chassis sequences (e.g., based on a desire to include a variety of canonical structures in a library). Kabat numbering of antibody amino acid sequences and structural considerations as described by Chothia et al., loc. cit. and their implications for construing canonical aspects of antibody structure, are described in the literature. The subunit structures and three-dimensional configurations of different classes of immunoglobulins are well known in the art. For a review of the antibody structure, see Antibodies: A Laboratory Manual, Cold Spring Harbor Laboratory, eds. Harlow et al., 1988. A global reference in immunoinformatics is the three-dimensional (3D) structure database of IMGT (international ImMunoGenetics information system) (Ehrenmann et al., 2010, Nucleic Acids Res., 38, D301-307). The IMGT/3Dstructure-DB structural data are extracted from the Protein Data Bank (PDB) and annotated according to the IMGT concepts of classification, using internal tools. Thus, IMGT/3Dstructure-DB provides the closest genes and alleles that are expressed in the amino acid sequences of the 3D structures, by aligning these sequences with the IMGT domain reference directory. This directory contains, for the antigen receptors, amino acid sequences of the domains encoded by the constant genes and the translation of the germline variable and joining genes. The CDR regions of our amino acid sequences were preferably determined by using the IMGT/3Dstructure database.

[0092] The CDR3 of the light chain and, particularly, the CDR3 of the heavy chain may constitute the most important determinants in antigen binding within the light and heavy chain variable regions. In some antibody constructs, the heavy chain CDR3 appears to constitute the major area of contact between the antigen and the antibody. In vitro selection schemes in which CDR3 alone is varied can be used to vary the binding properties of an antibody or determine which residues contribute to the binding of an antigen. Hence, CDR3 is typically the greatest source of molecular diversity within the antibody-binding side. H3, for example, can be as short as two amino acid residues or greater than 26 amino acids.

[0093] In a classical full-length antibody or immunoglobulin, each light (L) chain is linked to a heavy (H) chain by one covalent disulfide bond, while the two H chains are linked to each other by one or more disulfide bonds depending on the H chain isotype. The CH domain most proximal to VH is usually designated as CH1. The constant (“C”) domains are not directly involved in antigen binding, but exhibit various effector functions, such as antibody-dependent, cell-mediated cytotoxicity and complement activation. The Fc region of an antibody is comprised within the heavy chain constant domains and is for example able to interact with cell surface located Fc receptors.

[0094] The sequence of antibody genes after assembly and somatic mutation is highly varied, and these varied genes are estimated to encode 10¹⁰ different antibody molecules (Immunoglobulin Genes, 2nd ed., eds. Jonio et al., Academic Press, San Diego, C A, 1995). Accordingly, the immune system provides a repertoire of immunoglobulins. The term “repertoire” refers to at least one nucleotide sequence derived wholly or partially from at least one sequence encoding at least one immunoglobulin. The sequence(s) may be generated by rearrangement in vivo of the V, D, and J segments of heavy chains, and the V and J segments of light chains. Alternatively, the sequence(s) can be generated from a cell in response to which rearrangement occurs, e.g., in vitro stimulation. Alternatively, part or all of the sequence(s) may be obtained by DNA splicing, nucleotide synthesis, mutagenesis, and other methods, see, e.g., U.S. Pat. No. 5,565,332. A repertoire may include only one sequence or may include a plurality of sequences, including ones in a genetically diverse collection.

[0095] The antibody construct defined in the context of the invention may also comprise additional domains, which are e.g. helpful in the isolation of the molecule or relate to an adapted pharmacokinetic profile of the molecule. Domains helpful for the isolation of an antibody construct may be selected from peptide motives or secondarily introduced moieties, which can be captured in an isolation method, e.g. an isolation column. Non-limiting embodiments of such additional domains comprise peptide motives known as Myc-tag, HAT-tag, HA-tag, TAP-tag, GST-tag, chitin binding domain (CBD-tag), maltose binding protein (MBP-tag), Flag-tag, Strep-tag and variants thereof (e.g. Strepll-tag) and His-tag. All herein disclosed antibody constructs characterized by the identified CDRs may comprise a His-tag domain, which is generally known as a repeat of consecutive His residues in the amino acid sequence of a molecule, preferably of five, and more preferably of six His residues (hexa-histidine). The His-tag may be located e.g. at the N- or C-terminus of the antibody construct, preferably it is located at the C-terminus. Most preferably, a hexa-histidine tag is linked via peptide bond to the C-terminus of the antibody construct according to the invention. Additionally, a conjugate system of PLGA-PEG-PLGA may be combined with a poly-histidine tag for sustained release application and improved pharmacokinetic profile.

[0096] Amino acid sequence modifications of the antibody constructs described herein are also contemplated. For example, it may be desirable to improve the binding affinity and/or other biological properties of the antibody construct. Amino acid sequence variants of the antibody constructs are prepared by introducing appropriate nucleotide changes into the antibody constructs nucleic acid, or by peptide synthesis. All of the below described amino acid sequence modifications should result in an antibody construct which still retains the desired biological activity (e.g. binding to CD16a, the other antigen on the surface of an immune effector cell, and/or the target cell surface antigen) of the unmodified parental molecule.

[0097] The term “amino acid” or “amino acid residue” typically refers to an amino acid having its art recognized definition such as an amino acid selected from the group consisting of alanine (Ala or A); arginine (Arg or R); asparagine (Asn or N); aspartic acid (Asp or D); cysteine (Cys or C); glutamine (Gln or Q); glutamic acid (Glu or E); glycine (Gly or G); histidine (His or H); isoleucine (Ile or I): leucine (Leu or L); lysine (Lys or K); methionine (Met or M); phenylalanine (Phe or F); proline (Pro or P); serine (Ser or S); threonine (Thr or T); tryptophan (Trp or W); tyrosine (Tyr or Y); and valine (Val or V), although modified, synthetic, or rare amino acids may be used as desired. Generally, amino acids can be grouped as having a nonpolar side chain (e.g., Ala, Cys, Ile, Leu, Met, Phe, Pro, Val); a negatively charged side chain (e.g., Asp, Glu); a positively charged sidechain (e.g., Arg, His, Lys); or an uncharged polar side chain (e.g., Asn, Cys, Gln, Gly, His, Met, Phe, Ser, Thr, Trp, and Tyr).

[0098] Amino acid modifications include, for example, deletions from, and/or insertions into, and/or substitutions of, residues within the amino acid sequences of the antibody constructs. Any combination of deletion, insertion, and substitution is made to arrive at the final construct, provided that the final construct possesses the desired characteristics. The amino acid changes also may alter post-translational processes of the antibody constructs, such as changing the number or position of glycosylation sites.

[0099] For example, 1, 2, 3, 4, 5, or 6 amino acids may be inserted, substituted or deleted in each of the CDRs (of course, dependent on their length), while 1, 2, 3, 4, 5, 6, 7, 8, 9, 10, 11, 12, 13, 14, 15, 16, 17, 18, 19, 20, or 25 amino acids may be inserted, substituted or deleted in each of the FRs. Preferably, amino acid sequence insertions into the antibody construct include amino- and/or carboxyl-terminal fusions ranging in length from 1, 2, 3, 4, 5, 6, 7, 8, 9 or 10 residues to polypeptides containing a hundred or more residues, as well as intra-sequence insertions of single or multiple amino acid residues. Corresponding modifications may also performed within a third binding domain of the antibody construct defined in the context of the invention. An insertional variant of the antibody construct defined in the context of the invention includes the fusion to the N-terminus or to the C-terminus of the antibody construct of an enzyme or the fusion to a polypeptide.

[0100] The sites of greatest interest for substitutional mutagenesis include (but are not limited to) the CDRs of the heavy and/or light chain, in particular the hypervariable regions, but FR alterations in the heavy and/or light chain are also contemplated. The substitutions are preferably conservative substitutions as described herein. Preferably, 1, 2, 3, 4, 5, 6, 7, 8, 9, or 10 amino acids may be substituted in a CDR, while 1, 2, 3, 4, 5, 6, 7, 8, 9, 10, 11, 12, 13, 14, 15, 16, 17, 18, 19, 20, or 25 amino acids may be substituted in the framework regions (FRs), depending on the length of the CDR or FR. For example, if a CDR sequence encompasses 6 amino acids, it is envisaged that one, two or three of these amino acids are substituted. Similarly, if a CDR sequence encompasses 15 amino acids it is envisaged that one, two, three, four, five or six of these amino acids are substituted.

[0101] A useful method for identification of certain residues or regions of the antibody constructs that are preferred locations for mutagenesis is called “alanine scanning mutagenesis” as described by Cunningham and Wells in Science, 244: 1081-1085 (1989). Here, a residue or group of target residues within the antibody construct is/are identified (e.g. charged residues such as arg, asp, his, lys, and glu) and replaced by a neutral or negatively charged amino acid (most preferably alanine or polyalanine) to affect the interaction of the amino acids with the epitope.

[0102] Those amino acid locations demonstrating functional sensitivity to the substitutions are then refined by introducing further or other variants at, or for, the sites of substitution. Thus, while the site or region for introducing an amino acid sequence variation is predetermined, the nature of the mutation per se needs not to be predetermined. For example, to analyze or optimize the performance of a mutation at a given site, alanine scanning or random mutagenesis may be conducted at a target codon or region, and the expressed antibody construct variants are screened for the optimal combination of desired activity. Techniques for making substitution mutations at predetermined sites in the DNA having a known sequence are well known, for example, M13 primer mutagenesis and PCR mutagenesis. Screening of the mutants is done using assays of antigen binding activities, such as for the binding to e.g. CD16a, the other antigen on the surface of an immune effector cell, and/or the target cell surface antigen binding.

[0103] Generally, if amino acids are substituted in one or more or all of the CDRs of the heavy and/or light chain, it is preferred that the then-obtained “substituted” sequence is at least 60% or at least 65%, more preferably at least 70% or at least 75%, even more preferably at least 80% or at least 85%, and particularly preferably at least 90% or at least 95% identical to the “original” CDR sequence. This means that it is dependent of the length of the CDR to which degree it is identical to the “substituted” sequence. For example, a CDR having 5 amino acids is preferably at least 80% identical to its substituted sequence in order to have at least one amino acid substituted. Accordingly, the CDRs of the antibody construct may have different degrees of identity to their substituted sequences, e.g., CDRL1 may have at least 80%, while CDRL3 may have at least 90%.

[0104] Preferred substitutions (or replacements) are conservative substitutions. However, any substitution (including non-conservative substitution) is envisaged as long as the antibody construct retains its capability to bind to e.g. the CD16a via the first binding domain, to the other antigen on the surface of an immune effector cell via the second binding domain, and/or to the target cell surface antigen via the third binding domain and/or its CDRs have an identity to the then substituted sequence (at least 60% or at least 65%, more preferably at least 70% or at least 75%, even more preferably at least 80% or at least 85%, and particularly preferably at least 90% or at least 95% identical to the “original” CDR sequence).

[0105] Conservative substitutions are shown in Table 1 under the heading of “preferred substitutions”. If such substitutions result in a change in biological activity, then more substantial changes, denominated “exemplary substitutions” in Table 1, or as further described below in reference to amino acid classes, may be introduced and the products screened for a desired characteristic.

TABLE 1
Amino acid substitutions

| Original | Exemplary Substitutions | Preferred Substitutions |
|---|---|---|
| Ala (A) | val, leu, ile | val |
| Arg (R) | lys, gln, asn | lys |
| Asn (N) | gln, his, asp, lys, arg | gln |
| Asp (D) | glu, asn | glu |
| Cys (C) | ser, ala | ser |
| Gln (Q) | asn, glu | asn |
| Glu (E) | asp, gln | asp |
| Gly (G) | ala | ala |
| His (H) | asn, gln, lys, arg | arg |
| Ile (I) | leu, val, met, ala, phe | leu |
| Leu (L) | norleucine, ile, val, met, ala | lie |
| Lys (K) | arg, gln, asn | arg |
| Met (M) | leu, phe, ile | leu |
| Phe (F) | leu, val, ile, ala, tyr | tyr |
| Pro (P) | ala | ala |
| Ser (S) | thr | thr |
| Thr (T) | ser | ser |
| Trp (W) | tyr, phe | tyr |
| Tyr (Y) | trp, phe, thr, ser | phe |
| Val (V) | ile, leu, met, phe, ala | leu |

[0106] Substantial modifications in the biological properties of the antibody construct of the present invention are accomplished by selecting substitutions that differ significantly in their effect on maintaining (a) the structure of the polypeptide backbone in the area of the substitution, for example, as a sheet or helical conformation, (b) the charge or hydrophobicity of the molecule at the target site, or (c) the bulk of the side chain. Naturally occurring residues are divided into groups based on common side-chain properties: (1) hydrophobic: norleucine, met, ala, val, leu, ile; (2) neutral hydrophilic: cys, ser, thr, asn, gln; (3) acidic: asp, glu; (4) basic: his, lys, arg; (5) residues that influence chain orientation: gly, pro; and (6) aromatic: trp, tyr, phe.

[0107] Non-conservative substitutions will entail exchanging a member of one of these classes for another class. Any cysteine residue not involved in maintaining the proper conformation of the antibody construct may be substituted, generally with serine, to improve the oxidative stability of the molecule and prevent aberrant crosslinking. Conversely, cysteine bond(s) may be added to the antibody to improve its stability (particularly where the antibody is an antibody fragment such as an Fv fragment).

[0108] For amino acid sequences, sequence identity and/or similarity is determined by using standard techniques known in the art, including, but not limited to, the local sequence identity algorithm of Smith and Waterman, 1981, Adv. Appl. Math. 2:482, the sequence identity alignment algorithm of Needleman and Wunsch, 1970, J. Mol. Biol. 48:443, the search for similarity method of Pearson and Lipman, 1988, Proc. Nat. Acad. Sci. U.S.A. 85:2444, computerized implementations of these algorithms (GAP, BESTFIT, FASTA, and TFASTA in the Wisconsin Genetics Software Package, Genetics Computer Group, 575 Science Drive, Madison, Wis.), the Best Fit sequence program described by Devereux et al., 1984, Nucl. Acid Res. 12:387-395, preferably using the default settings, or by inspection. Preferably, percent identity is calculated by FastDB based upon the following parameters: mismatch penalty of 1; gap penalty of 1; gap size penalty of 0.33; and joining penalty of 30, “Current Methods in Sequence Comparison and Analysis,” Macromolecule Sequencing and Synthesis, Selected Methods and Applications, pp 127-149 (1988), Alan R. Liss, Inc.

[0109] An example of a useful algorithm is PILEUP. PILEUP creates a multiple sequence alignment from a group of related sequences using progressive, pairwise alignments. It can also plot a tree showing the clustering relationships used to create the alignment. PILEUP uses a simplification of the progressive alignment method of Feng & Doolittle, 1987, J. Mol. Evol. 35:351-360; the method is similar to that described by Higgins and Sharp, 1989, CABIOS 5:151-153. Useful PILEUP parameters including a default gap weight of 3.00, a default gap length weight of 0.10, and weighted end gaps.

[0110] Another example of a useful algorithm is the BLAST algorithm, described in: Altschul et al., 1990, J. Mol. Biol. 215:403-410; Altschul et al., 1997, Nucleic Acids Res. 25:3389-3402; and Karin et al., 1993, Proc. Natl. Acad. Sci. U.S.A. 90:5873-5787. A particularly useful BLAST program is the WU-BLAST-2 program which was obtained from Altschul et al., 1996, Methods in Enzymology 266:460-480. WU-BLAST-2 uses several search parameters, most of which are set to the default values. The adjustable parameters are set with the following values: overlap span=1, overlap fraction=0.125, word threshold (T)=ll. The HSP S and HSP S2 parameters are dynamic values and are established by the program itself depending upon the composition of the particular sequence and composition of the particular database against which the sequence of interest is being searched; however, the values may be adjusted to increase sensitivity.

[0111] An additional useful algorithm is gapped BLAST as reported by Altschul et al., 1993, Nucl. Acids Res. 25:3389-3402. Gapped BLAST uses BLOSUM-62 substitution scores; threshold T parameter set to 9; the two-hit method to trigger ungapped extensions, charges gap lengths of k a cost of 10+k; Xu set to 16, and Xg set to 40 for database search stage and to 67 for the output stage of the algorithms. Gapped alignments are triggered by a score corresponding to about 22 bits.

[0112] Generally, the amino acid homology, similarity, or identity between individual variant CDRs or VH/VL sequences are at least 60% to the sequences depicted herein, and more typically with preferably increasing homologies or identities of at least 65% or 70%, more preferably at least 75% or 80%, even more preferably at least 85%, 90%, 91%, 92%, 93%, 94%, 95%, 96%, 97%, 98%, 99%, and almost 100%. In a similar manner, “percent (%) nucleic acid sequence identity” with respect to the nucleic acid sequence of the binding proteins identified herein is defined as the percentage of nucleotide residues in a candidate sequence that are identical with the nucleotide residues in the coding sequence of the antibody construct. A specific method utilizes the BLASTN module of WU-BLAST-2 set to the default parameters, with overlap span and overlap fraction set to 1 and 0.125, respectively.

[0113] Generally, the nucleic acid sequence homology, similarity, or identity between the nucleotide sequences encoding individual variant CDRs or VH/VL sequences and the nucleotide sequences depicted herein are at least 60%, and more typically with preferably increasing homologies or identities of at least 65%, 70%, 75%, 80%, 81%, 82%, 83%, 84%, 85%, 86%, 87%, 88%, 89%, 90%, 91%, 92%, 93%, 94%, 95%, 96%, 97%, 98%, or 99%, and almost 100%. Thus, a “variant CDR” or a “variant VH/VL region” is one with the specified homology, similarity, or identity to the parent CDR/VH/VL defined in the context of the invention, and shares biological function, including, but not limited to, at least 60%, 65%, 70%, 75%, 80%, 81%, 82%, 83%, 84%, 85%, 86%, 87%, 88%, 89%, 90%, 91%, 92%, 93%, 94%, 95%, 96%, 97%, 98%, or 99% of the specificity and/or activity of the parent CDR or VH/VL.

[0114] In one embodiment, the percentage of identity to human germline of the antibody constructs according to the invention is ≥70% or ≥75%, more preferably ≥80% or ≥85%, even more preferably ≥90%, and most preferably ≥91%, ≥92%, ≥93%, ≥94%, ≥95% or even ≥96%. Identity to human antibody germline gene products is thought to be an important feature to reduce the risk of therapeutic proteins to elicit an immune response against the drug in the patient during treatment. Hwang & Foote (“Immunogenicity of engineered antibodies”; Methods 36 (2005) 3-10) demonstrate that the reduction of non-human portions of drug antibody constructs leads to a decrease of risk to induce anti-drug antibodies in the patients during treatment. By comparing an exhaustive number of clinically evaluated antibody drugs and the respective immunogenicity data, the trend is shown that humanization of the V-regions of antibodies makes the protein less immunogenic (average 5.1% of patients) than antibodies carrying unaltered non-human V regions (average 23.59% of patients). A higher degree of identity to human sequences is hence desirable for V-region based protein therapeutics in the form of antibody constructs. For this purpose of determining the germline identity, the V-regions of VL can be aligned with the amino acid sequences of human germline V segments and J segments (http://vbase.mrc-cpe.cam.ac.uk/) using Vector NTI software and the amino acid sequence calculated by dividing the identical amino acid residues by the total number of amino acid residues of the VL in percent. The same can be for the VH segments (http://vbase.mrc-cpe.cam.ac.uk/) with the exception that the VH CDR3 may be excluded due to its high diversity and a lack of existing human germline VH CDR3 alignment partners. Recombinant techniques can then be used to increase sequence identity to human antibody germline genes.

[0115] The term “EGFR” refers to the epidermal growth factor receptor (EGFR; ErbB-1; HER1 in humans, including all isoforms or variants described with activation, mutations and implicated in pathophysiological processes. The EGFR antigen-binding site recognizes an epitope in the extracellular domain of the EGFR. In certain embodiments the antigen-binding site specifically binds to human and cynomolgus EGFR. The epidermal growth factor receptor (EGFR) is a member of the HER family of receptor tyrosine kinases and consists of four members: EGFR (ErbB1/HER1), HER2/neu (ErbB2), HER3 (ErbB3) and HER4 (ErbB4). Stimulation of the receptor through ligand binding (e.g. EGF, TGFa, HB-EGF, neuregulins, betacellulin, amphiregulin) activates the intrinsic receptor tyrosine kinase in the intracellular domain through tyrosine phosphorylation and promotes receptor homo- or heterodimerization with HER family members. These intracellular phospho-tyrosines serve as docking sites for various adaptor proteins or enzymes including SHC, GRB2, PLCg and PI(3)K/Akt, which simultaneously initiate many signaling cascades that influence cell proliferation, angiogenesis, apoptosis resistance, invasion and metastasis.

[0116] As used herein, the term “CD19” refers to the Cluster of Differentiation 19 protein, which is an antigenic determinant detectable on leukemia precursor cells. The human and murine amino acid and nucleic acid sequences can be found in a public database, such as GenBank, UniProt and Swiss-Prot. For example, the amino acid sequence of human CD19 can be found as UniProt/Swiss-Prot Accession No. P15391 and the nucleotide sequence encoding of the human CD19 can be found at Accession No. NM_001178098. As used herein, “CD19” includes proteins comprising mutations, e.g., point mutations, fragments, insertions, deletions and splice variants of full length wild-type CD19. CD19 is expressed on most B lineage cancers, including, e.g., acute lymphoblastic leukaemia, chronic lymphocyte leukaemia and non-Hodgkin lymphoma. It is also an early marker of B cell progenitors. See, e.g., Nicholson et al. Mol. Immun. 34 (16-17): 1157-1165 (1997).

[0117] The term “immune effector cell” as used herein may refer to any leukocyte or precursor involved e.g. in defending the body against cancer, diseases induced by infectious agents, foreign materials or autoimmune reactions. For example, the immune effector cells comprise B lymphocytes (B cells), T lymphocytes (T cells, including CD4+ and CD8+ T cells), NK cells, NKT cells, monocytes, macrophages, dendritic cells, mast cells, granulocytes such as neutrophils, basophils and eosinophils, innate lymphoid cells (ILCs, which comprise ILC-1, ILC-2 and ILC-3) or any combinations thereof. Preferably, the term immune effector cell refers to an NK cell, an ILC-1 cell, a NKT cell, a macrophage, a monocyte, and/or a T cell, such as a CD8+ T cell or a γδ T cell.

[0118] Natural killer (NK) cells are CD56+CD3− large granular lymphocytes that can kill virally infected and transformed cells, and constitute a critical cellular subset of the innate immune system (Godfrey J, et al. Leuk Lymphoma 2012 53:1666-1676). Unlike cytotoxic CD8+ T lymphocytes, NK cells launch cytotoxicity against tumor cells without the requirement for prior sensitization and can also eradicate MHC-I-negative cells (Narni-Mancinelli E, et al. Int Immunol 2011 23:427-431). NK cells are safer effector cells, as they may avoid the potentially lethal complications of cytokine storms (Morgan R A, et al. Mol Ther 2010 18:843-851), tumor lysis syndrome (Porter D L, et al. N Engl J Med 2011 365:725-733), and on-target, off-tumor effects.

[0119] Monocytes are produced by the bone marrow from haematopoietic stem cell precursors called monoblasts. Monocytes circulate in the bloodstream for about one to three days and then typically move into tissues throughout the body. They constitute between three to eight percent of the leukocytes in the blood. In the tissue monocytes mature into different types of macrophages at different anatomical locations. Monocytes have two main functions in the immune system: (1) replenish resident macrophages and dendritic cells under normal states, and (2) in response to inflammation signals, monocytes can move quickly (approx. 8-12 hours) to sites of infection in the tissues and divide/differentiate into macrophages and dendritic cells to elicit an immune response. Monocytes are usually identified in stained smears by their large bilobate nucleus.

[0120] Macrophages are potent effectors of the innate immune system and are capable of at least three distinct anti-tumor functions: phagocytosis, cellular cytotoxicity, and antigen presentation to orchestrate an adaptive immune response. While T cells require antigen-dependent activation via the T cell receptor or the chimeric immunoreceptor, macrophages can be activated in a variety of ways. Direct macrophage activation is antigen-independent, relying on mechanisms such as pathogen associated molecular pattern recognition by Toll-like receptors (TLRs). Immune-complex mediated activation is antigen dependent but requires the presence of antigen-specific antibodies and absence of the inhibitory CD47-SIRPa interaction.

[0121] T cells or T lymphocytes can be distinguished from other lymphocytes, such as B cells and natural killer cells (NK cells), by the presence of a T-cell receptor (TCR) on the cell surface. They are called T cells because they mature in the thymus (although some also mature in the tonsils). There are several subsets of T cells, each with a distinct function.

[0122] T helper cells (TH cells) assist other white blood cells in immunologic processes, including maturation of B cells into plasma cells and memory B cells, and activation of cytotoxic T cells and macrophages. These cells are also known as CD4+ T cells because they express the CD4 glycoprotein on their surface. Helper T cells become activated when they are presented with peptide antigens by MHC class II molecules, which are expressed on the surface of antigen-presenting cells (APCs). Once activated, they divide rapidly and secrete small proteins called cytokines that regulate or assist in the active immune response. These cells can differentiate into one of several subtypes, including TH1, TH2, TH3, TH17, TH9, or TFH, which secrete different cytokines to facilitate a different type of immune response.

[0123] Cytotoxic T cells (TC cells, or CTLs) destroy virally infected cells and tumor cells, and are also implicated in transplant rejection. These cells are also known as CD8+ T cells since they express the CD8 glycoprotein at their surface. These cells recognize their targets by binding to antigen associated with MHC class I molecules, which are present on the surface of all nucleated cells. Through IL-10, adenosine and other molecules secreted by regulatory T cells, the CD8+ cells can be inactivated to an anergic state, which prevents autoimmune diseases.

[0124] Memory T cells are a subset of antigen-specific T cells that persist long-term after an infection has resolved. They quickly expand to large numbers of effector T cells upon re-exposure to their cognate antigen, thus providing the immune system with “memory” against past infections. Memory cells may be either CD4+ or CD8+. Memory T cells typically express the cell surface protein CD45RO.

[0125] Regulatory T cells (Treg cells), formerly known as suppressor T cells, are crucial for the maintenance of immunological tolerance. Their major role is to shut down T cell-mediated immunity toward the end of an immune reaction and to suppress auto-reactive T cells that escaped the process of negative selection in the thymus. Two major classes of CD4+ Treg cells have been described-naturally occurring Treg cells and adaptive Treg cells.

[0126] Natural killer T (NKT) cells (not to be confused with natural killer (NK) cells) bridge the adaptive immune system with the innate immune system. Unlike conventional T cells that recognize peptide antigens presented by major histocompatibility complex (MHC) molecules, NKT cells recognize glycolipid antigen presented by a molecule called CD1d.

[0127] As used herein, the term “half-life extensions domain” relates to a moiety that prolongs serum half-life of the antibody construct. The half-life extension domain may comprise a portion of an antibody, such as an Fc part of an immunoglobulin, a hinge domain, a CH2 domain, a CH3 domain, and/or a CH4 domain. Although less preferred, a half-life extension domain can also comprise elements that are not comprised in an antibody, such as an albumin binding peptide, an albumin binding protein, or transferrin to name only a few. A half-life extension domain preferably does not have an immune-modulatory function. If a half-life extension domain comprises a hinge, CH2 and/or CH3 domain, the half-life extension domain preferably does not essentially bind to an Fc receptor. This can e.g. be achieved through “silencing” of the Fcγ receptor binding domain.

[0128] As used herein, “silencing” of the Fc or Fcγ receptor binding domain refers to any modification that reduces binding of a CH2 domain to an Fc receptor, in particular an Fcγ receptor. Such modification can be done by replacement and/or deletion of one or more amino acids that are involved in Fc(γ) receptor-binding. Such mutations are well known in the art and have e.g. been described by Saunders (2019, Front. Immunol. 10:1296). For example, a mutation can be located at any one of the positions 233, 234, 235, 236, 237, 239, 263, 265, 267, 273, 297, 329, and 331. Examples for such mutations are: deletion of Glu 233->Pro, Glu 233, Leu 234->Phe, Leu 234->Ala, Leu 234->Gly, Leu 234->Glu, Leu 234->Val, deletion of Leu 234, Leu 235->Glu, Leu 235->Ala, Leu 235->Arg, Leu 235->Phe, deletion of Leu 235, deletion of Gly 236, Gly 237->Ala, Ser 239->Lys, Val 263->Leu, Asp 265->Ala, Ser 267->Lys, Val 273->Glu, Asn 297->Gly, Asn 297->Ala, Lys 332->Ala, Pro 329->Gly, Pro 331->Ser and combinations thereof. Preferably, such a modification comprises one or both of Leu 234->Ala and Leu 235->Ala (also known as “LALA” mutation). Preferably, such a modification further comprises a Pro 329->Gly mutation, also known as “LALA-PG” mutation (Leu 234->Ala, Leu 235->Ala, and Pro 329->Gly). Preferably, such a modification comprises 1, 2, or 3 of the mutations Leu 234->Phe, Leu 235->Glu, and Asp 265->Ala, more preferably all three of these mutations. The combination Leu 234->Phe, Leu 235->Glu, and Asp 265->Ala, which is a preferred modification in the context of the present invention, is also known as “FEA” mutation. Preferably, such a modification further comprises Asn 297->Gly. Such a preferred modification comprises the mutations Leu 234->Phe, Leu 235->Glu, Asp 265->Ala, and Asn 297->Gly.

[0129] The term “fratricide” describes in the context of the invention the reduction of effector cells by cytotoxic kill and, thereby the reduction of the available effector cell population/compartment. Fratricide can be caused by cross-linking of two immune cells. As an illustrative example, cross-linking of NK cells can cause the killing of either one or both of the NK cells. Since the antibody construct in some embodiments recruits two different types of effector cells, e.g. NK cells and macrophages or NK cells and T cells also the elimination of one type of effector cells by the other type of effector cells is understood as fratricide in the context of the invention. Fratricide can be e.g. measured in an assay as essentially described in Example 12 or 13.

### DETAILED DESCRIPTION

[0130] Innate immune effector cells (e.g. natural killer (NK) cells, macrophages) are activated by a complex mechanism of several different signaling pathways. NK cells and macrophages can be harnessed in cancer immunotherapy by redirecting NK cell lysis or macrophage-induced phagocytosis to tumor cells through stimulation of the activating antigen CD16A (FcγRIIIA) expressed on their cell surface. CD16A is associated with the signaling adaptor CD3ζ chain containing an immunoreceptor tyrosine-based activation motif (ITAM), initiating signaling cascades that ultimately mediate ADCC and ADCP in NK cells and macrophages, respectively.

[0131] Signaling via CD16A has been reported sufficient to activate the cytotoxic activity of NK cells. However, in circumstances of e.g. an immunosuppressive tumor microenvironment stimulation via CD16A may be suboptimal or insufficient for maximal anti-tumor activity. Therefore, targeting of an additional surface antigen on NK cells, macrophages, or other immune cell types such as, but not limited to, CD8+ αβ T cells or γδ T cells may improve or maximize anti-tumor activity.

[0132] However, since cross-linking of two immune effector cell may result in fratricide of immune effector cells, the present invention aims at providing an antibody construct that is capable of simultaneously binding an immune effector cell via either the first binding domain (A) or the second binding domain (B) and a target cell via the third binding domain (C), while the capacity of the antibody construct to simultaneously bind to two different immune effector cells, e.g. two different NK cells or an NK cell and a macrophage or T cell, is reduced or preferably even absent. This may be achieved by adjusting the distance of binding sites of the first binding domain (A) and the second binding domain (B). This may also be achieved by adjusting the spatial orientation of the first binding domain (A) and the second binding domain (B) relative to each other. Accordingly, the antibody construct of the present invention preferably binds to a target cell and one immune effector cell simultaneously. In this context, “one” is preferably to be understood as “only one” or “not more than one”.

[0133] The present invention thus envisions an antibody construct comprising a first binding domain (A), which is capable of specifically binding to a first target (A′) that is CD16A, a second binding domain (B), which is capable of specifically binding to a second target (B′) that is an antigen on the surface of an immune effector cell, which is not CD16A, and a third binding domain (C), which is capable of specifically binding a third target (C′) that is an antigen on the surface of a target cell. Accordingly, the antibody construct of the invention is at least trispecific.

[0134] Without wishing to be bound by theory, the inventors of the present application believe that the binding sites of the first binding domain (A) and the second binding domain (B) must have at least a certain distance to each other to have the capacity of simultaneous binding of two immune effector cells. This is based on the assumption that there is a minimum possible distance between two neighboring cells. It is assumed that this minimum possible distance is in the range of about 10-30 nm (i.e. ≥10 nm), which corresponds to the size of the immunological synapse (sometimes also denoted synaptic cleft) between an immune effector cell (e.g. NK cell) and its target cell (cf. Mace et al., Immunol Cell Biol. 2014 March; 92(3): 245-255; McCann et al., J Immunol. 2003 Mar. 15; 170(6):2862-70). In line with this consideration, it is further believed that there is a transition range above the theoretical minimum distance, where an antibody construct's capacity to simultaneously engage two different immune effector cells is reduced due to emerging steric hindrance at shorter distances between the binding sites of the first binding domain (A) and the second binding domain (B). It is thus believed that if the distance between the first binding domain (A) and the second binding domain (B) is small in an antibody construct comprising a first binding domain (A) that is specific for CD16A and a second binding domain (B) that is specific for another target on an immune effector cell (e.g. NKp46), the antibody construct's capacity of simultaneously binding to two immune effector cells will be significantly reduced. This is because antibody constructs having short distances between both engager domains are less accessible for the second immune effector cells, which results in a lower likelihood of binding of the second immune effector cell. At even smaller distances, at which the distance is too short to bridge the minimum possible distance between two immune effector cells, it is assumed that the antibody construct's capacity of simultaneously binding to two immune effector cells is essentially absent. A reduced or impaired simultaneous binding of two different immune effector cells is believed to reduce or impair fratricide. A distance between the engager domains and preferably between the antigen binding sites of the engager domains at which the antibody construct's capacity to simultaneously bind to two different immune effector cells is reduced is preferably about 25 nm or less (illustrated exemplarily in FIG. 15). However, even shorter distances are more preferred because it is believed that the shorter the distance between the engager domains and preferably the antigen-binding sites of the two engager domains is, the stronger will be the reduction of the antibody construct's capacity of simultaneously binding two immune effector cells. Thus, a more preferred distance between the engager domains and preferably the antigen-binding sites of the two engager domains (first binding domain (A) and second binding domain (B)) is about 20 nm or less, even more preferred is a distance of about 15 nm or less, even more preferred is a distance of about 10 nm or less. At distances below about 10 nm in an antibody construct of the invention, in particular for antibody constructs in which the first binding domain (A) is specific for CD16A and the second binding domain (B) is specific for NKG2D or NKp46, it is believed that simultaneous binding to different immune effector cells via these two binding domains is essentially absent.

[0135] The antibody construct of the invention is characterized by inducing a low degree of fratricide, which is also referred to as a “sufficiently reduced” degree of fratricide. The degree of fratricide can be measured in a cytotoxicity assay, such as an assay as essentially described in Example 8. Such an assay is preferably conducted as follows. For calcein-release cytotoxicity assays to assess NK-NK cell lysis, half of the enriched, non-activated NK cells were washed with RPMI 1640 medium without FCS and labeled with 10 μM calcein AM (Invitrogen/Molecular Probes, cat.: C3100MP) for 30 min in RPMI 1640 medium without FCS at 37° C. After gentle washing, the labeled cells were resuspended in complete RPMI medium (RPMI 1640 medium supplemented with 10% heat-inactivated FCS, 4 mM L-glutamine, 100 U/mL penicillin G sodium, 100 μg/mL streptomycin sulfate) to a density of 5×10⁵/mL. 5×10⁴ calcein-labeled NK cells (E) were then seeded together with 5×10⁴ non-labeled NK cells (T) from the same donor at an E:T ratio of 1:1 in the presence of increasing concentrations of the indicated antibodies, preferentially in the range between 10 ng/mL and 100 μg/mL, in individual wells of a round-bottom 96-well microplate in a total volume of 200 μL/well in duplicates. Human IgG1 anti-CD38 (IgAb_51, SEQ ID NOs: 429 and 430 can be used as a positive control). Spontaneous release, maximal release and killing of targets by effectors (E) in the absence of antibodies are determined in quadruplicate on each plate. For induction of maximal calcein-release Triton X-100 was added to the respective wells at a final concentration of 1%. After centrifugation for 2 min at 200×g the assay was incubated for 4 h at 37° C. in a humidified atmosphere with 5% CO₂. After an additional centrifugation for 5 min at 500×g 100 μL cell culture supernatant were harvested from each well, transferred to a black flat-bottom microplate, and the fluorescence of the released calcein was measured at 520 nm using a fluorescence plate reader (EnSight, Perkin Elmer). On the basis of the measured fluorescence counts, the specific cell lysis was calculated according to the following formula: [fluorescence (sample)−fluorescence (spontaneous)]/[fluorescence (maximum)−fluorescence (spontaneous)]×100%. Fluorescence (spontaneous) represents the fluorescent counts from calcein-labeled NK cells (T) in the absence of non-labeled NK cells and antibodies and fluorescence (maximum) represents the total cell lysis induced by the addition of Triton X-100 (1% final concentration). The degree of fratricide is preferably determined at a concentration of 100 μg/mL of the test antibody and/or the control.

[0136] The afore-mentioned assay is preferably used for determining NK-NK cell lysis. However, if the second binding site (B) binds to a second target (B′) that is expressed on the surface of another immune effector cell, such as a T cell, the assay can be adapted to measure NK cell-mediated lysis (fratricide) of the other immune effector cell, such as NK-T cell lysis. For this purpose, the population of cells, of which the lysis should be measured, can be labeled with calcein AM (instead of using the calcein-labeled NK cells as described above). For example, if NK-T cell lysis is to be measured, the calcein-labeled NK cells as described above should be replaced with calcein-labeled T cells. The remaining steps of the assay are essentially the same. In preferred embodiments, “fratricide” relates to NK cell-mediated lysis of a given immune effector cell. This means that the population of cells, of which lysis should be measured should be a population that expresses the second target (B′) on its surface.

[0137] In some embodiments, a “low degree of fratricide” means that the degree of fratricide of a test molecule, such as an antibody construct of the invention, is about 25% or lower. The degree of fratricide of an antibody construct of the invention is preferably about 22% or lower, more preferably about 20% or lower, more preferably about 19% or lower, more preferably about 18% or lower, more preferably about 17% or lower, more preferably about 16% or lower, more preferably about 15% or lower, more preferably about 14% or lower, more preferably about 13% or lower, more preferably about 12% or lower, more preferably about 11% or lower, more preferably about 10% or lower, preferably determined at a concentration of 100 μg/mL. In some even more preferred embodiments, the degree of fratricide of an antibody of the invention is even lower, such as preferably about 9% or lower, more preferably about 8% or lower, more preferably about 7% or lower, more preferably about 6% or lower, more preferably about 5% or lower, more preferably about 4% or lower, more preferably about 3% or lower, more preferably about 2% or lower, or more preferably about 1% or lower, or most preferably non-detectable with an assay essentially described herein, preferably as defined supra, preferably determined at a concentration of 100 μg/mL.

[0138] In some embodiments, an antibody construct of the invention induces a degree of fratricide that is lower as compared to the anti-CD38 antibody shown in SEQ ID NOs: 429-430, preferably determined at a concentration of 100 μg/mL of the test antibody and the control.

[0139] In some embodiments, an antibody construct of the invention induces a degree of fratricide that that is lower as compared to a control antibody as show in SEQ ID NOs: 393-395, preferably determined at a concentration of 100 μg/mL of the test antibody and the control. In some embodiments, an antibody construct of the invention induces a degree of fratricide that is lower as compared to a control antibody as show in SEQ ID NOs: 396-398, preferably determined at a concentration of 100 μg/mL of the test antibody and the control. In some embodiments, an antibody construct of the invention induces a degree of fratricide that that is lower as compared to a control antibody as show in SEQ ID NOs: 399-401, preferably determined at a concentration of 100 μg/mL of the test antibody and the control. In some embodiments, an antibody construct of the invention induces a degree of fratricide that is lower as compared to a control antibody as show in SEQ ID NOs: 402-404, preferably determined at a concentration of 100 μg/mL of the test antibody and the control. In some embodiments, an antibody construct of the invention induces a degree of fratricide that is lower as compared to a control antibody as show in SEQ ID NOs: 405-407, preferably determined at a concentration of 100 μg/mL of the test antibody and the control. In some embodiments, an antibody construct of the invention induces a degree of fratricide that is lower as compared to a control antibody as show in SEQ ID NOs: 408-410, preferably determined at a concentration of 100 μg/mL of the test antibody and the control. In some embodiments, an antibody construct of the invention induces a degree of fratricide that is lower as compared to a control antibody as show in SEQ ID NOs: 411-413, preferably determined at a concentration of 100 μg/mL of the test antibody and the control. In some embodiments, an antibody construct of the invention induces a degree of fratricide that is lower as compared to a control antibody as show in SEQ ID NOs: 414-416, preferably determined at a concentration of 100 μg/mL of the test antibody and the control. In some embodiments, an antibody construct of the invention induces a degree of fratricide that is lower as compared to a control antibody as show in SEQ ID NOs: 417-419, preferably determined at a concentration of 100 μg/mL of the test antibody and the control. In some embodiments, an antibody construct of the invention induces a degree of fratricide that is lower as compared to a control antibody as show in SEQ ID NOs: 420-422, preferably determined at a concentration of 100 μg/mL of the test antibody and the control. In some embodiments, an antibody construct of the invention induces a degree of fratricide that is lower as compared to a control antibody as show in SEQ ID NOs: 423-425, preferably determined at a concentration of 100 μg/mL of the test antibody and the control. In some embodiments, an antibody construct of the invention induces a degree of fratricide that is lower as compared to a control antibody as show in SEQ ID NOs: 426-428, preferably determined at a concentration of 100 μg/mL of the test antibody and the control.

[0140] In some embodiments, an antibody construct of the invention induces a degree of fratricide that is lower as compared to a control antibody construct that has a format as essentially shown in FIG. 11, wherein the third binding domains (C) of the control antibody construct and the antibody construct of the invention have the same CDR sequences, or preferably the same VH and VL regions, and wherein the second binding domains (B) of the control antibody construct and the antibody construct of the invention have the same CDR sequences, or preferably the same VH and VL regions, and wherein the control antibody construct comprises a CH2 domain in which the Fcγ receptor binding domain has not been silenced, preferably determined at a concentration of 100 μg/mL of the test antibody and the control.

[0141] In some embodiments, an antibody construct of the invention induces a degree of fratricide that is lower as compared a control antibody construct that has a format as essentially shown in FIG. 12, wherein the third binding domains (C) of the control antibody construct and the antibody construct of the invention have the same CDR sequences, or preferably the same VH and VL regions, and wherein the second binding domains (B) of the control antibody construct and the antibody construct of the invention have the same CDR sequences, or preferably the same VH and VL regions, and wherein the control antibody construct comprises a CH2 domain in which the Fcγ receptor binding domain has not been silenced, preferably determined at a concentration of 100 μg/mL of the test antibody and the control.

[0142] The antibody construct of the disclosure may comprise a fourth domain (D), which comprises a half-life extension domain as described herein. The half-life extension domain may comprise a CH2 domain, in which the Fcγ receptor binding domain of the CH2 domain is silenced. The half-life extension domain may comprise two such CH2 domains. Whenever a half-life extension domain comprises a CH2 domain, the Fcγ receptor binding domain of the CH2 domain is silenced. The half-life extension domain may comprise a CH3 domain. The half-life extension domain may comprise two CH3 domains. The half-life extension domain may comprise a hinge domain. The half-life extension domain may comprise two hinge domains. The half-life extension domain may comprise a CH2 domain and a CH3 domain. In such a case, the CH2 domain and CH3 domain are preferably fused to each other, preferably in the (amino to carboxyl) order CH2 domain-CH3 domain. Non-limiting examples for such fusions are shown in SEQ ID NOs: 97-105. The half-life extension domain may comprise a hinge domain and a CH2 domain. In such a case, the hinge domain and the CH2 domain are preferably fused to each other, preferably in the (amino to carboxyl) order hinge domain-CH2 domain. The half-life extension domain may comprise a hinge domain, a CH2 domain, and a CH3 domain. In such a case, the hinge domain, the CH2 domain, and CH3 domain are preferably fused to each other, preferably in the (amino to carboxyl) order hinge domain-CH2 domain-CH3 domain. The half-life extending domain may comprise two hinge domain-CH2 domain elements, two CH2 domain-CH3 domain elements, or two hinge domain-CH2 domain-CH3 domain elements. In such a case the two fusions may be located on two different polypeptide strands. Alternatively, the fusions can be located on the same polypeptide strand. An illustrative example for two hinge domain-CH2 domain-CH3 domain elements that are located on the same polypeptide strand is the “single chain Fc” or “scFc” format. Here, both hinge-CH2-CH3 subunits are fused together via a linker that allows assembly of a Fc domain. A preferred linker for this purpose is a glycine serine linker, which preferably comprises from about 20 to about 40 amino acids. Preferred glycine serine linkers may have one or more repeats of GGS, GGGS (SEQ ID NO: 451), or GGGGS (SEQ ID NO: 84). Such linker preferably comprises 4-8 repeats (e.g. 4, 5, 6, 7, or 8 repeats) of GGGGS. Such a linker is preferably (GGGGS)₆, (SEQ ID NO 87). Illustrative examples for such scFc domains are shown in SEQ ID NOs 106-107. Further scFc constant domains are known in the art and inter alia described in WO 2017/134140.

[0143] The first binding domain (A) is preferably derived from an antibody. The first binding domain (A) preferably comprises a VH and a VL domain of an antibody. Preferred structures for the first binding domain (A) include a Fv, a scFv, a Fab, or a VL and VH pair which may be comprised in a diabody (db), scDb or a double Fab.

[0144] The second binding domain (B) is also preferably derived from an antibody. The second binding domain (B) preferably comprises a VH and a VL domain of an antibody. Preferred structures for the second binding domain (B) include a Fv, a scFv, a Fab, or a VL and VH pair which may be comprised in a diabody (db), scDb or a double Fab.

[0145] The third binding domain (C) is also preferably derived from an antibody. The third binding domain (C) preferably comprises a VH and a VL domain of an antibody. Preferred structures for the third binding domain (C) include a Fv, a scFv, a Fab, or a VL and VH pair which may be comprised in a diabody (db), scDb or a double Fab.

[0146] In order to provide a short distance between the first binding domain (A) and the second binding domain (B) both domains may be fused to adjacent positions or fused to each other. For example, the first binding domain (A) and the second binding domain (B) can be fused to a pair (e.g. a dimer) of two constant domains of an antibody, such as a pair of two CH3 domains, a pair of two CH2 domains, or a pair of a CH1 domain and a CL domain. In such a case, it is preferred that both the first binding domain (A) and the second binding domain (B) are fused to the C termini of the pair of the two constant domains or that both the first binding domain (A) and the second binding domain (B) are fused to the N termini of the pair of the two constant domains. In a preferred embodiment, the first binding domain (A) is fused to the C terminus of a first CH3 domain and the second binding domain (B) is fused to the C terminus of a second CH3 domain. The third binding domain (C) can be located at any suitable position of the antibody construct.

[0147] Generally, the antibody constructs of the disclosure can be monovalent, bivalent, trivalent, or have an even higher valency for any one of the first target (A′), the second target (B′), and/or the third target (C′). The antibody constructs of the disclosure may thus comprise one, two, three, or even more of any one of the first binding domain (A), the second binding domain (B), or the third binding domain (C). It is preferred for the antibody construct of the invention that it is at least bivalent for the first target (A′) and the second target (B′). It is further preferred for the antibody construct of the invention that it is monovalent for the first target (A′) and at least bivalent for the second target (B′). More preferably, the antibody construct of the invention is monovalent for the first target (A′) and the second target (B′). It is preferred for the antibody construct of the invention that it comprises at least two first binding domains (A) and at least two second binding domains (B). It is further preferred for the antibody construct of the invention that it comprises one first binding domain (A) and at least two second binding domains (B). More preferably, the antibody construct of the invention comprises one first binding domain (A) and one second binding domain (B). It also preferred that the antibody construct of the invention is monovalent for the third target (C′). It is also preferred that the antibody construct of the invention is at least trivalent for the third target (C′). It is more preferred that the antibody construct of the invention is bivalent for the third target (C′). It is also preferred for the antibody construct of the invention that it comprises one third binding domain (C). It is also preferred for the antibody construct of the invention that it comprises at least three third binding domains (C). It is more preferred for the antibody construct of the invention that it comprises two third binding domains (C).

[0148] It is preferred for the antibody construct of the invention that it is at least bivalent for CD16A and the antigen on the surface of an effector cell, which is not CD16A. It is further preferred for that antibody construct, that it is monovalent for CD16A and at least bivalent for the antigen on the surface of an effector cell, which is not CD16A. More preferably, the antibody construct of the invention is monovalent for CD16A and the antigen on the surface of an effector cell, which is not CD16A.

[0149] In a preferred embodiment, the first binding domain (A) and second binding domain (B) are fused to two C termini of a Fc region. Such a fusion format is illustratively shown in FIG. 7. The first binding domain (A) and/or second binding domain (B) may be fused to a constant domain of an antibody via a linker. Such a linker is preferably a short linker, which preferably has a length of about 10 nm or less, preferably about 9 nm or less, preferably about 8 nm or less, preferably about 7 nm or less, preferably about 6 nm or less, preferably about 5 nm or less, preferably about 4 nm or less, or even less. The length of the linker is preferably determined as described by Rossmalen et al Biochemistry 2017, 56, 6565-6574, which also describes suitable linkers that are well known to the skilled person. An example for a suitable linker is a glycine serine linker or a serine linker, which preferably comprise no more than about 75 amino acids, preferably not more than about 50 amino acids. In illustrative example, a suitable linker comprises one or more (e.g. 1, 2, 3, 4, 5, 6, 7, or 8) GGGGS sequences (SEQ ID NO: 84), such as (GGGGS)₂ (SEQ ID NO: 85), (GGGGS)₄ (SEQ ID NO: 86), or preferably (GGGGS)₆ (SEQ ID NO: 87). Other illustrative examples for linkers are shown in SEQ ID NOs: 80-83. The first binding domain (A) and/or the second binding domain (B) are preferably scFv fragments that are fused to two C termini of a Fc domain, preferably via the VL domain of the scFv. Accordingly, the arrangement of the polypeptide chain (from N to C) is preferably . . . -CH2-CH3-VL-VH, optionally with a linker between the Fc and the scFv. The third binding domain can be located at any suitable position of the antibody construct. Where the antibody construct comprises a Fc region, the third binding domain (C) can be located N terminal of the Fc region, either directly or linked via at least a part of a hinge domain. Other linkers disclosed herein can also be used to link the third binding domain to the Fc domain. A hinge domain is however preferred for this purpose. The third binding domain (C) can be any suitable structure disclosed herein, while a Fab structure is preferred.

[0150] An antibody construct of the invention is preferably in a format as essentially shown in FIG. 7 and which is also referred to as “AIG-2scFv”. Such an antibody construct comprises an immunoglobulin that has two scFv fragments fused to the C termini of the heavy chains, optionally via a linker, which is preferably a connector, disclosed herein. One of the two scFv forms the first binding domain (A), while the other scFv forms the second binding domain (B). Two third binding domains (C) are formed by the binding sites of the immunoglobulin. The AIG-2scFv format may comprise four polypeptide chains, two light chains in the arrangement VL(C)-CL, one heavy chain fused to a scFv in the arrangement VH(C)-CH1-hinge-CH2-CH3-VL(A)-VH(A) (or less preferred VH(C)-CH1-hinge-CH2-CH3-VH(A)-VL(A)), and one heavy chain fused to a scFv in the arrangement VH(C)-CH1-hinge-CH2-CH3-VL(B)-VH(B) (or less preferred VH(C)-CH1-hinge-CH2-CH3-VH(B)-VL(B)). The letters in parenthesis stand for first binding domain (A), second binding domain (B), or third binding domain (C), respectively. For example, VL(A) stands for a VL domain of a first binding domain (A), while VH(B) stands for a VH domain of a second binding domain (B). Illustrative examples for such antibody constructs are shown in SEQ ID NOs: 329-331; 332-334; 335-337; 338-340, 490-492, and 493-495.

[0151] In a preferred embodiment, two first binding domains (A) and two second binding domains (B) are fused to two C termini of a Fc region. Such a fusion format is illustratively shown in FIG. 9. The two first binding domains (A) are preferably fused together in form of a diabody or single chain diabody, preferably via a VL domain of a first binding domain (A). Likewise, the two second binding domains (B) are preferably fused together in form of a diabody or single chain diabody, preferably via a VL domain of a second binding domain. The first binding domains (A) and/or second binding domains (B) may be fused to a constant domain of an antibody via a linker. Such a linker is preferably a short linker, which preferably has a length of about 10 nm or less, preferably about 9 nm or less, preferably about 8 nm or less, preferably about 7 nm or less, preferably about 6 nm or less, preferably about 5 nm or less, preferably about 4 nm or less, or preferably even less. The length of the linker is preferably determined as described by Rossmalen et al Biochemistry 2017, 56, 6565-6574, which also describes suitable linkers that are well known to the skilled person. An example for a suitable linker is a glycine serine linker or a serine linker, which preferably comprises not more than about 75 amino acids, preferably not more than about 50 amino acids. In illustrative examples, a suitable linker comprises one or more GGGGS sequences (SEQ ID NO: 84), such as (GGGGS)₂ (SEQ ID NO: 85), (GGGGS)₄ (SEQ ID NO: 86), or preferably (GGGGS)₆ (SEQ ID NO: 87). Other illustrative examples for linkers are shown in SEQ ID NOs: 80-83. The first binding domains (A) and/or the second binding domains (B) are preferably scDb fragments that are fused to two C termini of a Fc domain, preferably via a VL domain of the scDb. Accordingly, the arrangement of on the polypeptide chain (from N to C) is preferably . . . -CH2-CH3-VL-VH-VL-VH, optionally with a linker between the Fc and the scDb. The third binding domain can be located at any suitable position of the antibody construct. Where the antibody construct comprises a Fc region, the third binding domain (C) can be located N terminal of the Fc region, either directly or linked via at least a part of a hinge domain. Other linkers disclosed herein can also be used to link the third binding domain to the Fc domain. A hinge domain is however preferred for this purpose. The third binding domain (C) can be any suitable structure disclosed herein, while a Fab structure is preferred.

[0152] An antibody construct of the invention is preferably in a format as essentially shown in FIG. 9 and which is also referred to as “AIG-2scDb”. Such an antibody construct comprises an immunoglobulin that has two scDb fragments fused to the C-termini of the heavy chains, optionally via a linker, which is preferably a connector, disclosed herein. One of the two scDb comprises two first binding domains (A), while the other scDb comprises two second binding domains (B). Two third binding domains (C) are formed by the binding sites of the immunoglobulin. The AIG-2scDb format may comprise four polypeptide chains, two light chains in the arrangement VL(C)-CL, one heavy chain fused to a scDb in the arrangement VH(C)-CH1-hinge-CH2-CH3-VL(A)-VH(A)-VL(A)-VH(A) (or less preferred VH(C)-CH1-hinge-CH2-CH3-VH(A)-VL(A)-VH(A)-VL(A)), and one heavy chain fused to an scDb in the arrangement VH(C)-CH1-hinge-CH2-CH3-VL(B)-VH(B)-VL(B)-VH(B) (or less preferred VH(C)-CH1-hinge-CH2-CH3-VH(B)-VL(B)-VH(B)-VL(B)). Illustrative examples for such antibody constructs are shown in SEQ ID NOs: 369-371; 372-374; 375-377; 378-380; 431-433; 434-436; and 437-439.

[0153] An antibody construct of the invention can also be a combination of a half-molecule of the “AIG-2scFv” and a half-molecule of the “AIG-2scDb” format. Such an antibody construct is also referred to as “AIG-1scDb-1scFv” format. Such an antibody construct comprises an immunoglobulin that has one scDb fragment fused the C-termini of one of the heavy chains, optionally via a linker, which is preferably a connector, disclosed herein. Such an antibody construct further comprises an immunoglobulin that has one scFv fragment fused the C-terminus of another one of the heavy chains, optionally via a linker, which is preferably a connector, disclosed herein. The scDb can comprise two first binding domains (A), while the scFv comprises one second binding domain (B). Alternatively, the scDb can comprise two second binding domains (B), while the scFv comprises one first binding domain (A). Two third binding domains (C) are formed by the binding sites of the immunoglobulin. The AIG-1scDb-1scFv format may comprise four polypeptide chains, two light chains in the arrangement VL(C)-CL, one heavy chain fused to a scDb in the arrangement VH(C)-CH1-hinge-CH2-CH3-VL(A)-VH(A)-VL(A)-VH(A) (or less preferred VH(C)-CH1-hinge-CH2-CH3-VH(A)-VL(A)-VH(A)-VL(A)), and one heavy chain fused to a scFv in the arrangement VH(C)-CH1-hinge-CH2-CH3-VL(B)-VH(B) (or less preferred VH(C)-CH1-hinge-CH2-CH3-VH(B)-VL(B)). Alternatively, the AIG-1scDb-1scFv format may comprise four polypeptide chains, two light chains in the arrangement VL(C)-CL, one heavy chain fused to an scDb in the arrangement VH(C)-CH1-hinge-CH2-CH3-VL(B)-VH(B)-VL(B)-VH(B) (or less preferred VH(C)-CH1-hinge-CH2-CH3-VH(B)-VL(B)-VH(B)-VL(B)), and one heavy chain fused to an scFv in the arrangement VH(C)-CH1-hinge-CH2-CH3-VL(A)-VH(A) (or less preferred VH(C)-CH1-hinge-CH2-CH3-VH(A)-VL(A)). An illustrative example for such an antibody construct is shown in SEQ ID NOs: 500-502.

[0154] For providing a short distance between the first binding domain (A) and the second binding domain (B), the first binding domain (A) and the second binding domain (B) can also be fused to the N-termini of a pair (e.g. a dimer) of two constant domains of an antibody, such as a pair of two CH3 domains, a pair of two CH2 domains, or a pair of a CH1 domain and a CL domain. In a preferred embodiment, the first binding domain (A) is fused to the N-terminus of a CH2 domain and the second binding domain (B) is fused to the N-terminus of another CH2 domain. In a preferred embodiment, the first binding domain (A) and second binding domain (B) are fused to two N-termini of a Fc region. It is preferred for the antibody constructs of the invention that a first binding domain (A) is fused to the N-terminus of a first hinge domain and the second binding domain (B) is fused to the N-terminus of a second hinge domain. Such a fusion format is illustratively shown in FIG. 4 or FIG. 5. The first binding domain (A) and/or second binding domain (B) may be fused to a constant domain of an antibody via a linker disclosed herein (such as a connector disclosed herein) or a hinge domain, with a hinge domain being preferred.

[0155] Generally, a hinge domain comprised in an antibody construct of the disclosure may comprise a full length hinge domain, such as a hinge domain shown in SEQ ID NO: 88. The hinge domain may also comprise a shortened and/or modified hinge domain. A shortened hinge domain may comprise the upper hinge domain as e.g. shown in SEQ ID NO: 89 or the middle hinge domain as e.g. shown in SEQ ID NO: 90, but not the entire hinge domain, with the latter being preferred. Preferred hinge domains in the context of the invention show modulated flexibility relative to an antibody construct having the wild type hinge domain as described in Dall'Acqua et al (J Immunol. 2006 Jul. 15; 177(2):1129-38) or in WO 2009/006520. A hinge domain showing reduced flexibility is preferred for some antibody constructs of the disclosure, in particular if the first binding domain (A) and/or second binding domain (B) are fused to the hinge domain. Moreover, preferred hinge domains are characterized to consist of less than 25 aa residues. More preferably, the length of the hinge is 10 to 20 aa residues. A hinge domain comprised in an antibody construct of the disclosure may also comprise or consists of the IgG2 subtype hinge sequence ERKCCVECPPCP (SEQ ID NO: 452), the IgG3 subtype hinge sequence ELKTPLDTTHTCPRCP (SEQ ID NO: 453) or ELKTPLGDTTHTCPRCP (SEQ ID NO: 454), and/or the IgG4 subtype hinge sequence ESKYGPPCPSCP (SEQ ID NO: 455). Further hinge domains that can be used in the context of the present invention are known to the skilled person and are e.g. described in WO 2017/134140.

[0156] When the first binding domain (A) is fused to the N-terminus of a CH2 domain and the second binding domain (B) is fused to the N-terminus of another CH2 domain, such as the first binding domain (A) and second binding domain (B) are fused to two N termini of a Fc region or hinge domains, with the hinge domains being preferred, the third binding domain (C) can be fused to the N-terminus or C terminus of either one of the two polypeptide chains. In preferred embodiments, two third binding domains (C) are fused to the two chains. Preferably, one third binding domain (C) is fused N-terminal to the first binding domain (A) and one third binding domain is fused to the N-terminus of the second binding domain (B). In a preferred antibody construct, the first binding domain (A), the second binding domain (B), and the third binding domain(s) (C) are scFvs. In such an antibody construct both polypeptide strand may have the arrangement (from N to C) of scFv of the third domain (C)-scFv of the first/second binding domain (A)/(B)-hinge-CH2-CH3. In the scFv moieties, the VL and VH domain can be arranged in any order. However, the arrangement VH-VL is preferred for the third binding domain(s), while the arrangement VL-VH is preferred for the first binding domain (A) and/or the second binding domain (B).

[0157] An antibody construct of the invention is preferably in a format as essentially shown in FIG. 5 and which is also referred to as “2tascFv-AFc”. Such an antibody construct comprises two polypeptide chains, in which a third binding domain (C) in form of an scFv fused to the N-terminus of a first/second binding domain (A)/(B) in form of a scFv, optionally via a linker disclosed herein, such as a connector discloses herein. The first/second binding domain (A)/(B) is further fused to the N-terminus of a hinge domain that is connected to a CH2-CH3 domain. The 2tascFv-AFc format may comprise two polypeptide chains, one polypeptide chain in the arrangement VH(C)-VL(C)-VL(A)-VH(A)-hinge-CH2-CH3, and one polypeptide chain in the arrangement VH(C)-VL(C)-VL(B)-VH(B)-hinge-CH2-CH3. Illustrative examples for such antibody constructs are shown in SEQ ID NOs: 269-270; 271-272; 273-274; 275-276; 277-278; 279-280; 281-282; and 283-284.

[0158] When the first binding domain (A) is fused to the N-terminus of a CH2 domain and the second binding domain (B) is fused to the N-terminus of another CH2 domain, such as when the first binding domain (A) and second binding domain (B) are fused to two N-termini of a Fc region, the third binding domain (C) can be fused to first binding domain (A) and/or the second binding domain (B) in form of a diabody or a single chain diabody. The first binding domain (A) and/or second binding domain (B) may be fused to the CH2 domain or Fc domain via a linker disclosed herein (such as a connector discloses herein) or a hinge domain, with a hinge domain being preferred. In the spatial arrangement of the diabody, the first binding domain (A) and/or the second binding domain (B) should be adjacent to the hinge or CH2 domain while the third binding domain (C) is remote from the hinge or CH2 domain. This is e.g. achieved by fusing a VL or VH of the first or second binding domain (A) or (B) to the hinge or CH2 domain. For diabodies, this means that the arrangement on one of the “heavy chain” of the antibody construct is VL(C)-VH(A)-hinge/CH2- . . . or VH(C)-VL(A)-hinge/CH2- . . . or VL(C)-VH(B)-hinge/CH2- . . . or VH(C)-VL(B)-hinge/CH2- . . . , while the arrangement on the “light chain” is VL(A)-VH(C) or VH(A)-VL(C) or VL(B)-VH(C) or VH(B)-VL(C), respectively. For single chain diabodies, the arrangement of the domains on the polypeptide chains may be VL(A)-VH(C)-VL(C)-VH(A)-hinge/CH2- . . . or VH(A)-VL(C)-VH(C)-VL(A)-hinge/CH2- . . . or VL(B)-VH(C)-VL(C)-VH(B)-hinge/CH2- . . . or VH(B)-VL(C)-VH(C)-VL(B)-hinge/CH2- . . . , with the latter one being preferred.

[0159] An antibody construct of the invention is preferably in a format as essentially shown in FIG. 4 and which is also referred to as “2scDb-AFc”. Such an antibody construct comprises two polypeptide chains. In the first polypeptide chain, a third binding domain (C) and a first binding domain (A) are fused to each other in form of a scDb, which is fused to a hinge-CH2-CH3 domain via a variable domain of the first binding domain (A). In the second polypeptide chain, a third binding domain (C) and a second binding domain (B) are fused to each other in form of a scDb, which is fused to a hinge-CH2-CH3 domain via a variable domain of the first binding domain (A). The first polypeptide chain preferably has the arrangement VH(A)-VL(C)-VH(C)-VL(A)-hinge-CH2-CH3. The second polypeptide chain preferably has the arrangement VH(B)-VL(C)-VH(C)-VL(B)-hinge-CH2-CH3. Illustrative examples for such antibody constructs are shown in SEQ ID NOs: 237-238, 239-240, 241-242, 243-244, 245-246, 247-248, 249-250, and 251-252.

[0160] In order to provide a short distance between the first binding domain (A) and the second binding domain (B) both domains may also be fused to each other. There are several possibilities of fusing the first binding domain (A) and the second binding domain (B). In some embodiments, the C-terminus of the VL of the first binding domain (A) is fused to the N-terminus of the VH of the second binding domain (B) while the C-terminus of the VL of the second binding domain (B) is fused to the N-terminus of the VH of the first binding domain (A). The two VH and two VL can either be comprised in one single polypeptide chain or into separate polypeptide chains. In some embodiments, the N-terminus of the VL of the first binding domain (A) is fused to the C-terminus of the VH of the second binding domain (B) while the N-terminus of the VL of the second binding domain (B) is fused to the C-terminus of the VH of the first binding domain (A). The two VH and two VL can either be comprised in one single polypeptide chain or into separate polypeptide chains. In some embodiments, the C-terminus of the VL of the first binding domain (A) is fused to the N-terminus of the VL of the second binding domain (B) while the C-terminus of the VH of the first binding domain (B) is fused to the N-terminus of the VH of the second binding domain (A). The two VH and two VL can either be comprised in one single polypeptide chain or in two separate polypeptide chains. In some embodiments, the C-terminus of the VL of the second binding domain (A) is fused to the N-terminus of the VL of the first binding domain (B) while the C-terminus of the VH of the second binding domain (B) is fused to the N-terminus of the VH of the first binding domain (A). The two VH and two VL can either be comprised in one single polypeptide chain or in two separate polypeptide chains. It is also preferred that the first and the second binding domain are fused to each other in form of a ta-scFv, a double Fab, a db or scDb, wherein a db or scDb is preferred, with the scDb being most preferred. The spatial arrangement of the variable domains of a db or a scDb is preferably in a VL-VH-VL-VH order.

[0161] Generally, if the first binding domain (A) and the second binding domain (B) are fused to each other, the fusion of first binding domain (A) and second binding domain (B) can be N-terminally fused to a hinge domain. In such a case, it is preferred that the first binding domain (A) is N-terminally fused to the hinge domain and the second binding domain (B) is N-terminally fused to the first binding domain (A). In this context, N-terminally fused may be understood in terms of the interconnection of the subunits, but it may also be understood as the spatial orientation of the subunits to each other, depending on the context.

[0162] Generally, if the first binding domain (A) and the second binding domain (B) are fused to each other, the fusion of first binding domain (A) and second binding domain (B) can be C-terminally to a CH3 domain. In such a case, it is preferred that the first binding domain (A) is C-terminally fused to the CH3 domain and the second binding domain (B) is C-terminally fused to the first binding domain (A). In this context, C-terminally fused may be understood in terms of the interconnection of the subunits, but it may also be understood as the spatial orientation of the subunits to each other, depending on the context.

[0163] Some preferred antibody constructs of the invention comprise a first binding domain (A) and a second binding domain (B) that are fused together in form of a db or scDb. In such a scDb, the domains on the polypeptide on the polypeptide chain are preferably arranged in the (N to C) order VL-VH-VL-VH. The preferred arrangements are VL(A)-VH(B)-VL(B)-VH(A) and VL(B)-VH(A)-VL(A)-VH(B) with VL(A)-VH(B)-VL(B)-VH(A) being more preferred. In a preferred version of a db, one polypeptide chain comprises two variable domains in the arrangement VL(B)-VH(A) and another polypeptide chain comprises two variable domains in the arrangement VL(A)-VH(B). In a more preferred version of a db, one polypeptide chain comprises two variable domains in the arrangement VL(A)-VH(B) and another polypeptide chain comprises two variable domains in the arrangement VL(B)-VH(A). The db or scDb are preferably fused to the antibody construct via the N-terminus of VL(A) or the C-terminus of VH(A). As an illustrative example, if such a db or more preferably a scDb is fused to the C-terminus of a CH3 domain, it is preferably fused via the N-terminus of the VL domain of the first binding domain (A). As another illustrative example, if such a db or more preferably a scDb is fused to the N-terminus of a CH3 domain, it is preferably fused via the C-terminus of the VH domain of the first binding domain (A).

[0164] In an antibody construct of the invention that comprises a first binding domain (A) that is fused to a second binding domain (B), the fusion of the first binding domain (A) and the second binding domain (B) can be fused to the third binding domain (C) in any order. It can be directly fused to the third binding domain (C). However, it is preferred that both, the fusion of the first and second binding domain (A) and (B) and the third binding domain (D) are fused to a fourth domain (D). If the fourth domain (D) consists of one single polypeptide chain, the fusion of the first and second binding domain (A) and (B) can either be fused to the N- or C-terminus of the fourth domain (D) while the third binding domain can be fused to the other terminus (either C- or N-terminus) of the fourth domain (D). If the fourth domain (D) comprises of two polypeptide chains, the fusion of the first and second binding domain (A) and (B) can either be fused to the N- or C-terminus of the fourth domain (D) while the third binding domain can be fused to any other “free” terminus (either C- or N-terminus) of the fourth domain (D).

[0165] In preferred antibody constructs of the invention, the antibody construct comprises two hinge-CH2-CH3 elements. These two hinge-CH2-CH3 can be located on one single polypeptide chain, e.g. in form of a scFc. It is however more preferred that these two hinge-CH2-CH3 are located on two separate polypeptide chains.

[0166] Some preferred formats for antibody constructs of the invention comprise (i) a first binding domain (A) and a second binding domain (B) that are fused together as described herein and (ii) a fourth domain (D) that comprise two hinge-CH2-CH3 elements.

[0167] In a preferred embodiment, two fusions of a first binding domain (A) and a second binding domain (B), preferably in form of a scDb, are fused to two C termini of a Fc region, preferably via the N-terminus of the VL of the first binding domain (A). Such a fusion format is illustratively shown in FIG. 8. The scDb may be fused to a constant domain of an antibody via a linker. Such a linker is preferably a short linker, which preferably has a length of about 10 nm or less, preferably about 9 nm or less, preferably about 8 nm or less, preferably about 7 nm or less, preferably about 6 nm or less, preferably about 5 nm or less, preferably about 4 nm or less, or even less. The length of the linker is preferably determined as described by Rossmalen et al Biochemistry 2017, 56, 6565-6574, which also describes suitable linkers that are are well known to the skilled person. An example for a suitable linker is a glycine serine linker or a serine linker, which preferably comprises not more than about 75 amino acids, preferably not more than about 50 amino acids. In illustrative examples a suitable linker comprises one or more GGGGS sequences (SEQ ID NO: 84), such as (GGGGS)₂ (SEQ ID NO: 85), (GGGGS)₄ (SEQ ID NO: 86), or preferably (GGGGS)₆ (SEQ ID NO: 87). Other illustrative examples for linkers are shown in SEQ ID NOs: 80-83. The third binding domain can be located at any suitable position of the antibody construct. It is however preferred that the third binding domain (C) is located N-terminal of the Fc region, either directly or linked via at least a part of a hinge domain. Other linkers disclosed herein can also be used to link the third binding domain to the Fc domain. A hinge domain is however preferred for this purpose. The third binding domain (C) can be any suitable structure disclosed herein, while a Fab structure is preferred.

[0168] An antibody construct of the invention is preferably in a format as essentially shown in FIG. 8 and which is also referred to as “IG-scDb”. Such an antibody construct comprises an immunoglobulin that has two scDb fragments fused to the C termini of the heavy chains, optionally via a linker disclosed herein, such as a connector disclosed herein. The two scDb each comprises a first binding domain (A) and a second binding domain (B). Two third binding domains (C) are formed by the binding sites of the immunoglobulin. The IG-scDb format may comprise four polypeptide chains, two light chains in the arrangement VL(C)-CL, and two heavy chain fused to a scDb in the arrangement VH(C)-CH1-hinge-CH2-CH3-VL(A)-VH(B)-VL(B)-VH(A) (or less preferred VH(C)-CH1-hinge-CH2-CH3-VH(A)-VL(B)-VH(B)-VL(A), VH(C)-CH1-hinge-CH2-CH3-VH(B)-VL(A)-VH(A)-VL(B), VH(C)-CH1-hinge-CH2-CH3-VL(B)-VH(A)-VL(A)-VH(B)). Illustrative examples for such antibody constructs are shown in SEQ ID NOs: 353-354; 355-356; 357-358; and 359-360.

[0169] When a fusion of a first binding domain (A) and a second binding domain (B) is fused to the N-terminus of a CH2 domain, a third binding domain (C) can be fused to the N-terminus of another CH2 domain. For example, the fusion of a first binding domain (A) and a second binding domain (B) and the third binding domain (C) can be fused to two N-termini of a Fc region, as illustratively shown in FIG. 2, 3, or 6. The fusion of a first binding domain (A) and a second binding domain (B) is preferably in the form of db, a double Fab or, more preferably, in form of a scDb. The third binding domain (C) is preferably in the form of a Fab. In some preferred embodiments, the antibody construct comprises two third binding domains (C), which are preferably in the form of two Fabs that are fused together, or a diabody. The fusion of a first binding domain (A) and a second binding domain (B) may be fused to the CH2 domain or Fc domain via a linker disclosed herein (such as a connector disclosed herein) or a hinge domain, with a hinge domain being preferred. In the spatial arrangement of the diabody, the first binding domain (A) is preferably adjacent to the hinge or CH2 domain while the second binding domain (B) is remote from the hinge or CH2 domain. This is e.g. achieved by fusing a VL or VH of the first binding domain (A) to the hinge or CH2 domain. For diabodies, this means that the arrangement on one of the “heavy chain” of the antibody construct is VL(B)-VH(A)-hinge/CH2- . . . or VH(B)-VL(A)-hinge/CH2- . . . , while the arrangement on the “light chain” is VL(A)-VH(B) or VH(A)-VL(B), respectively. For single chain diabodies, the arrangement of the domains on the polypeptide chains may be VL(A)-VH(B)-VL(B)-VH(A)-hinge/CH2- . . . or VH(A)-VL(B)-VH(B)-VL(A)-hinge/CH2- . . . , with the latter one being preferred.

[0170] An antibody construct of the invention is preferably in a format as essentially shown in shown in FIG. 3 and which is also referred to as “1Fab-1scDb-AFc”. Such an antibody construct comprises three polypeptide chains. The first polypeptide chain comprises a heavy chain of an antibody that binds to the third target (C′), i.e. that comprises a variable domain of a third binding domain (C). The first polypeptide chain preferably has the arrangement VH(C)-CH1-hinge-CH2-CH3. The second polypeptide chain comprises a light chain of an antibody that binds to the third target (C′), i.e. that comprise the variable domain of a third binding domain. The second polypeptide chain preferably has the arrangement VL(C)-CL. The third polypeptide comprises a scDb comprising the first binding domain (A) and the second binding domain (B), which is fused to the N-terminus of a hinge-CH2-CH3 domain. The scDb is preferably fused to the hinge-CH2-CH3 domain via a variable region of the first binding domain (A), more preferably via the C-terminus of the VH domain of the first binding domain (A). The third polypeptide preferably comprises the arrangement VL(A)-VH(B)-VL(B)-VH(A)-hinge-CH2-CH3. Illustrative examples for such antibody constructs are shown in SEQ ID NOs: 225-227; 228-230; 231-233; 234-236.

[0171] An antibody construct of the invention is preferably in a format as essentially shown in FIG. 2 and which is also referred to as “2Fab-1scDb-AFc”. Such an antibody construct comprises four or three polypeptide chains. One polypeptide chain comprises a heavy chain of an antibody that binds to the third target (C′), i.e. that comprises a variable domain of a third binding domain (C), which further comprises a polypeptide chain of a Fab fused to its N-terminus. The Fab fused to the N-terminus also binds the third target (C′). The first polypeptide chain preferably has the arrangement VH(C)-CH1-VH(C)-CH1-hinge-CH2-CH3, while other arrangement such as VL(C)-CL-VH(C)-CH1-hinge-CH2-CH3 are also possible but less preferred. Another polypeptide chain of the 2Fab-1scDb-AFc construct comprises light chain of an antibody that binds to the third target (C′), i.e. that comprise the variable domain of a third binding domain (C). The further polypeptide chain comprises a variable and the constant region that forms the second polypeptide chain of the Fab that is fused to the N-terminus of the heavy chain. Depending on which chain of the Fab is fused to the N-terminus of the heavy chain, the further polypeptide chain may have the arrangement VH(C)-CH1 or VL(C)-CL, with VL(C)-CL being preferred. Optionally, although not preferred, the two “light chains” that form the two third binding domains (C) can be fused together, optionally via a linker, optionally a linker disclosed herein. A further polypeptide comprises a diabody comprising the first binding domain (A) and the second binding domain (B), which is fused to the N-terminus of a hinge-CH2-CH3 domain. The scDb is preferably fused to the hinge-CH2—CH3 domain via a variable region of the first binding domain (A), more preferably via the C-terminus of the VH domain of the first binding domain (A). The further polypeptide preferably comprises the arrangement VL(A)-VH(B)-VL(B)-VH(A)-hinge-CH2-CH3. Illustrative examples for such antibody constructs are shown in SEQ ID NOs: 177-179; 180-182; 183-185; 186-188; 189-191; 192-194; 195-197; and 198-200.

[0172] An antibody construct of the invention is preferably in a format as essentially shown in FIG. 1 and which is also referred to as “2Fab-1scFc-1scDb”. Such an antibody construct comprises three or two polypeptide chains. One polypeptide chain comprises two chains of a Fab that binds to the third target (C′) fused to the N-terminus of a scFc, which is further fused via its C-terminus to a diabody comprising the first binding domain (A) and the second binding domain (B). While any two chains of the two Fabs that bind to the third target (C′) can be fused to the scFc domain, two VH-CH1 elements are preferred. Similarly, the diabody can be fused to the scFc via any one of its variable domains. However, it is preferred that a variable domain of the first binding domain (A) is fused to the scFc element. It is even more preferred that the VL of the first binding domain (A) is fused to the scFc domain. A preferred arrangement for this polypeptide chain is VH(C)-CH1-VH(C)-CH1-hinge-CH2-CH3-hinge-CH2-CH3-VL(A)-VH(B)-VL(B)-VH(A). The two other polypeptide chains of the 2Fab-1scFc-1scDb construct each comprise a variable and a constant region that form the second polypeptide chain of the two Fabs that are fused to the N-terminus of the scFc. Depending on which chain of the Fabs fused to the N-terminus of the scFc, the further polypeptide chains may have the arrangement VH(C)-CH1 or VL(C)-CL, with VL(C)-CL being preferred. Optionally, although not preferred, the two “light chains” that form the two third binding domains (C) can be fused together, optionally via a linker, optionally a linker disclosed herein. Illustrative examples for such antibody constructs are shown in SEQ ID NOs: 161-162; 163-164; 165-166; and 167-168.

[0173] An antibody construct of the invention is preferably in a format as referred to as “1scFv-1scFc-1scDb”. Such an antibody construct comprises one polypeptide chain. The polypeptide chain comprises an scFv that binds to the third target (C′) fused to the N-terminus of a scFc, which is further fused via its C-terminus to a diabody comprising the first binding domain (A) and the second binding domain (B). Any chain of the scFv that binds to the third target (C′) can be fused to the scFc domain. Accordingly, either the VL domain or the VH domain of the scFv can be fused to the scFc domain, with a VH domain being preferred. Similarly, the diabody can be fused to the scFc via any one of its variable domains. However, it is preferred that a variable domain of the first binding domain (A) is fused to the scFc element. It is even more preferred that the VL of the first binding domain (A) is fused to the scFc domain. A preferred arrangement for this polypeptide chain is VL(C)-VH(C)-hinge-CH2-CH3-hinge-CH2-CH3-VL(A)-VH(B)-VL(B)-VH(A). Another preferred arrangement for this polypeptide chain is VH(C)-VL(C)-hinge-CH2-CH3-hinge-CH2-CH3-VL(A)-VH(B)-VL(B)-VH(A).

[0174] An antibody construct of the invention is preferably in a format as referred to as “1tascFv-1scFc-1scDb”. Such an antibody construct comprises one polypeptide chain. The polypeptide chain comprises an ta-scFv in which both scFv bind to the third target (C′). The two scFv comprised in the ta-scFv are optionally fused to each other via a linker disclosed herein. The ta-scFv is fused to the N-terminus of a scFc, which is further fused via its C-terminus to a diabody comprising the first binding domain (A) and the second binding domain (B). Any arrangement of the ta-scFv can be used. Accordingly, the ta-scFv moiety can have the arrangement VL(C)-VH(C)-VL(C)-VH(C)- . . . , VH(C)-VL(C)-VH(C)-VL(C)- . . . , VL(C)-VH(C)-VH(C)-VL(C)- . . . , or VH(C)-VL(C)-VL(C)-VH(C)- . . . , with VH(C)-VL(C)-VL(C)-VH(C)- . . . being preferred. Accordingly, either a VL domain or a VH domain of the ta-scFv can be fused to the scFc domain, with a VH domain being preferred. Similarly, the diabody can be fused to the scFc via any one of its variable domains. However, it is preferred that a variable domain of the first binding domain (A) is fused to the scFc element. It is even more preferred that the VL of the first binding domain (A) is fused to the scFc domain. A preferred arrangement for this polypeptide chain is VL(C)-VH(C)-VL(C)-VH(C)-hinge-CH2-CH3-hinge-CH2-CH3-VL(A)-VH(B)-VL(B)-VH(A). Another preferred arrangement for this polypeptide chain is VH(C)-VL(C)-VH(C)-VL(C)-hinge-CH2-CH3-hinge-CH2-CH3-VL(A)-VH(B)-VL(B)-VH(A). Another preferred arrangement for this polypeptide chain is VL(C)-VH(C)-VH(C)-VL(C)-hinge-CH2-CH3-hinge-CH2-CH3-VL(A)-VH(B)-VL(B)-VH(A). Another preferred arrangement for this polypeptide chain is VH(C)-VL(C)-VL(C)-VH(C)-hinge-CH2-CH3-hinge-CH2-CH3-VL(A)-VH(B)-VL(B)-VH(A).

[0175] An antibody construct of the invention is preferably in a format as essentially shown in FIG. 6 and which is also referred to as “1scDb-2Fab-AFc”. Such an antibody construct comprises three polypeptide chains. A first polypeptide comprises a diabody comprising two third binding domains (C), which is fused to the N-terminus of a hinge-CH2-CH3 domain. The diabody can be fused to the hinge-CH2-CH3 domain via any variable region of the diabody. However, a fusion via the C-terminus of a VL domain is preferred. This polypeptide chain preferably comprises the arrangement VH(C)-VL(C)-VH(C)-VL(C)-hinge-CH2-CH3. A second polypeptide chain comprises a chain of a Fab specific for the first target (A′) fused to a chain of a Fab specific for the second target (B′) fused together, which is further fused via their C-terminus to a hinge-CH2-CH3 region. The arrangements of the Fab chains to each other can be in any order, i.e. the Fab chain specific for the first target (A′) can be fused to the Fab chain specific for the second target (B′) either N-terminally or C-terminally. However, it is preferred that the Fab chain specific for the second target (B′) is N-terminal of the Fab chain specific for the first target (A′). While any two chains of the two Fabs that bind to the first target (A′) and the second target (B′) can be fused to the hinge-CH2-CH3 domain, two VH-CH1 elements are preferred. This polypeptide chain preferably comprises the arrangement VH(B)-CH1-VH(A)-CH1-hinge-CH2-CH3. The third polypeptide chain comprises the other two Fab chains that bind to the first target (A′) and the second target (B′). Depending on which chains are fused to the hinge-CH2-CH3 region, the Fab chains comprised in the third polypeptide may comprise VL-CL or VH-CH1, with VL-CL being preferred. The arrangement of the two Fab chains to each other also depend on the arrangement of the Fab chains fused to the hinge-CH2-CH3 region. If the Fab chain specific for the second target (B′) is N-terminal to the Fab chain specific for the first target (A′) on the second polypeptide chain, the Fab chain specific for the second target (B′) should also be N-terminal to the Fab chain specific for the first target (A′) on the third polypeptide chain, and vice versa. The third polypeptide chain preferably comprises the arrangement VL(B)-CL(B)-VL(A)-CL(A). Illustrative examples for such antibody constructs are shown in SEQ ID NOs: 293-295; 296-298; 299-301; 302-304; 305-307; 308-310; 311-313; and 314-316.

[0176] Ideally, the distance between the binding site of the first binding domain (A) and the second binding domain (B) is short. It is thus preferred that the two binding domains are within the distance of about 25 nm or less, more preferably about 22 nm or less, more preferably about 20 nm or less, more preferably about 19 nm or less, more preferably about 18 nm or less, more preferably about 17 nm or less, more preferably about 16 nm or less, more preferably about 15 nm or less, more preferably about 14 nm or less, more preferably about 13 nm or less, more preferably about 12 nm or less, more preferably about 11 nm or less, more preferably about 10 nm or less, more preferably about 9 nm or less, more preferably about 8 nm or less, more preferably about 7 nm or less, more preferably about 6 nm or less, more preferably about 5 nm or less. The distance is preferably determined from the center of the binding site. If the antibody construct comprises more than one first binding domain (A) and/or second binding domain (B), the distance between the domains are preferably measured between the first binding domain (A) and the second binding domain (B) that have the largest distance to each other. For determining the distance between two binding domains, crystal structures are preferred. Where crystal structures are not available, structural considerations according Rossmalen et al Biochemistry 2017, 56, 6565-6574, are preferably applied, in particular with regard to linkers.

[0177] Apart from the distance between the first binding domain (A) and a second binding domain (B), also the orientation of their binding sites can contribute to avoiding simultaneous binding to two different immune effector cells, or at least reducing its likelihood. Without wishing to be bound by theory, it is believed that the more both binding domains face the same direction the less likely it becomes that the two binding domains simultaneously bind to two different immune effector cells. It is further believed that binding sites facing more or less the same direction allow for a longer distance between the two binding domains (A) and (B) without mediating the simultaneous binding of two immune effector cells. The spatial orientation of the binding domain can also be modulated by the domain via it is fused to another element of the antibody construct it is fused to. For example, the antibody construct comprises a Fc domain having two (hinge)-CH2-CH3 elements, and if the first binding domain (A) and the second binding domain (B) are fused to different chains of this Fc domain it is preferred to fuse the light chain of the two binding domains (A) and (B) to the Fc domain, since such an arrangement is believed to provide binding sites of the two binding domains which face a more similar direction. Also, in a diabody comprising the two binding domains (A) and (B), it is preferred to have the arrangement VL-VH-VL-VH, since this also provides binding sites that face a more similar direction.

[0178] Accordingly, it is preferred for the antibody constructs of the invention that the binding sites of the first binding domain (A) and the binding site of the second binding domain (B) are in cis-orientation. In this context, cis-orientation means that the binding sites of the two binding domains point into directions which form an angle of about 1200 or less, preferably about 900 or less, which preferably favors binding of both domains to the same effector cell.

[0179] However, in order to facilitate simultaneous binding of an effector cell and a target cell, the third binding site (C) may point to an opposite direction as at least one, preferably both of the binding sites of the first binding domain (A) and/or second binding domain (B) which is referred to as trans-orientation. Therefore, it is preferred for the antibody constructs of the invention that the binding site of the first binding domain (A) and the binding site of the third binding domain (C) are in trans-orientation. Further, it is also preferred for the antibody construct of the invention that the binding site of the second binding domain (B) and the binding site of the third binding domain (C) are in trans-orientation. It is even more preferred for the antibody constructs of the invention that the binding site of both the first binding domain (A) and the second binding domain are in trans-orientation to the binding site of the third binding domain (C). In this context, trans-orientation means that the two binding sites face directions which are in an angle of about 1200 or more, preferably about 1350 or more.

[0180] Where an antibody construct of the invention comprises CH3 regions, modifications to the CH3 region can be introduced to improve heterodimeric pairing of the polypeptides comprising the CH3 regions. The CH3 regions can be altered by the “knob-into-holes” technology which is described in detail with several examples in e.g. WO 96/027011, Ridgway, J., B., et al., Protein Eng 9 (1996) 617-621; and Merchant, A. M., et al., Nat Biotechnol 16 (1998) 677-681. In this method the interaction surfaces of the two CH3 domains are altered to increase the heterodimerisation of both heavy chains containing these two CH3 domains. Each of the two CH3 domains (of the two heavy chains) can be the “knob”, while the other is the “hole”. The introduction of a disulfide bridge stabilizes the heterodimers (Merchant, A. M., et al., Nature Biotech 16 (1998) 677-681; Atwell, S., et al., J. Mol. Biol. 270 (1997) 26-35) and increases the yield.

[0181] Thus the antibody constructs of the disclosure may be further characterized in that the CH3 domain of one polypeptide chain and the CH3 domain of another polypeptide chain each meet at an interface which comprises an original interface between the antibody CH3 domains; wherein the interface is altered to promote the formation of the antibody construct. An alteration may be characterized in that: a) the CH3 domain of one polypeptide chain is altered, so that within the original interface the CH3 domain of one polypeptide chain that meets the original interface of the CH3 domain of the other polypeptide chain within the antibody construct, an amino acid residue is replaced with an amino acid residue having a larger side chain volume, thereby generating a protuberance within the interface of the CH3 domain of one polypeptide chain which is positionable in a cavity within the interface of the CH3 domain of the other polypeptide chain and b) the CH3 domain of the other polypeptide chain is altered, so that within the original interface of the second CH3 domain that meets the original interface of the first CH3 domain within the antibody construct an amino acid residue is replaced with an amino acid residue having a smaller side chain volume, thereby generating a cavity within the interface of the second CH3 domain within which a protuberance within the interface of the first CH3 domain is positionable.

[0182] Preferably the amino acid residue having a larger side chain volume is selected from the group consisting of arginine (R), phenylalanine (F), tyrosine (Y), tryptophan (W). Preferably the amino acid residue having a smaller side chain volume is selected from the group consisting of alanine (A), serine (S), threonine (T), valine (V).

[0183] Both CH3 domains further be altered by the introduction of cysteine (C) as amino acid in the corresponding positions of each CH3 domain such that a disulfide bridge between both CH3 domains can be formed.

[0184] In a preferred embodiment, the antibody construct comprises a T366W mutation in the CH3 domain of the “knobs chain” and T366S, L368A, Y407V mutations in the CH3 domain of the “hole chain”. An additional interchain disulfide bridge between the CH3 domains can also be used (Merchant, A. M, et al., Nature Biotech 16 (1998) 677-681) e.g. by introducing a Y349C mutation into the CH3 domain of the “knobs chain” and a E356C mutation or a S354C mutation into the CH3 domain of the “hole chain”. Alternatively, the antibody construct may comprise a T366Y in the CH3 domain of the “knobs chain” and a Y407T mutation in the “hole chain”. Other knobs-in-holes technologies that can also be used are described in Labrijn A F, Janmaat M L, Reichert J M, Parren P. Bispecific antibodies: a mechanistic review of the pipeline. Nat Rev Drug Discov 2019; 18:585-608. Preferred versions of knob chain CH2-CH3 heavy chain constant domains are shown in SEQ ID NOs: 101 and 103. Preferred versions of hole chain CH2-CH3 heavy chain constant domains are shown in SEQ ID NOs: 100 and 102.

[0185] The present invention preferably relates to a trispecific antibody construct, which binds to a target cell and one immune effector cell simultaneously, said antibody construct comprising (i.) a first binding domain (A), which is capable of specifically binding to a first target (A′) that is CD16A which is preferably on the surface of an immune effector cell; (ii.) a second binding domain (B), which is capable of specifically binding to a second target (B′) that is another antigen which is on the surface of an immune effector cell, with the exception of CD16A wherein it is preferred that said antigen is selected from the group comprising CD56, NKG2A, NKG2D, NKp30, NKp44, NKp46, NKp80, DNAM-1, SLAMF7, OX40, CD47/SIRPα, CD89, CD96, CD137, CD160, TIGIT, nectin-4, PD-1, PD-L1, LAG-3, CTLA-4, TIM-3, KIR2DL1-5, KIR3DL1-3, KIR2DS1-5 and CD3; and (iii.) a third binding domain (C), which is capable of specifically binding to a third target (C′) that is an antigen which is preferably on the surface of a target cell.

[0186] As already described herein, the first binding domain (A) is capable of specifically binding CD16A, which preferably includes the capacity to discriminate between CD16A and CD16B. With other words, the first binding domain (A) preferably binds CD16A with higher affinity than CD16B, which may be at least about 10-fold higher, at least about 100-fold higher, or at least about 1000-fold higher. More preferably, the first binding domain does not essentially bind CD16B. It is thus understood that the first binding domain is preferably not a non-silenced CH2 domain, i.e. a CH2 domain that is capable of binding both CD16A and CD16B.

[0187] Accordingly the first binding domain preferably binds to an epitope of CD16A which comprises amino acid residues of the C-terminal sequence SFFPPGYQ (positions 201-209 of SEQ ID NO: 449), and/or residue G147 and/or residue Y158 of CD16A, which are not present in CD16B. It is preferred in the context of the invention that the first binding domain, which binds CD16A on the surface of an effector cell binds to an epitope on CD16A, which is membrane proximal relative to the physiological Fcγ receptor binding domain of CD16A. A binding domain that specifically binds to an epitope comprising Y158 is preferred, because this epitope is proximal to the cell membrane and thus further contributes to reducing the likelihood of simultaneously binding a second immune effector cell. Examples for respective binding domains are characterized e.g. by the following groups of CDRs: CDR-H1 as depicted in SEQ ID NO: 26, a CDR-H2 as depicted in SEQ ID NO: 27, a CDR-H3 as depicted in SEQ ID NO: 28, a CDR-L1 as depicted in SEQ ID NO: 29, a CDR-L2 as depicted in SEQ ID NO: 30, a CDR-L3 as depicted in SEQ ID NO: 31 and binding domains which bind to the same epitope. Preferred CD16A binding domains are characterized by the following groups of CDRs: CDR-H1 as depicted in SEQ ID NO: 32, a CDR-H2 as depicted in SEQ ID NO: 33, a CDR-H3 as depicted in SEQ ID NO: 34, a CDR-L1 as depicted in SEQ ID NO: 35, a CDR-L2 as depicted in SEQ ID NO: 36, a CDR-L3 as depicted in SEQ ID NO: 37 and binding domains which bind to the same epitope. Examples for such CD16A binder are also described in WO2020043670.

[0188] In some embodiments, the first binding domain comprises (i) a VL region comprising CDR-L1, CDR-L2 and CDR-L3 selected from: (a) CDR-L1 as depicted in SEQ ID NO: 29, a CDR-L2 as depicted in SEQ ID NO: 30, a CDR-L3 as depicted in SEQ ID NO: 31; and (b) CDR-L1 as depicted in SEQ ID NO: 35, a CDR-L2 as depicted in SEQ ID NO: 36, a CDR-L3 as depicted in SEQ ID NO: 37 and (ii) a VH region comprising CDR-H1, CDR-H2 and CDR-H3 selected from: (a) CDR-H1 as depicted in SEQ ID NO: 26, a CDR-H2 as depicted in SEQ ID NO: 27, a CDR-H3 as depicted in SEQ ID NO: 28; and a CDR-L1 as depicted in SEQ ID NO: 29, a CDR-L2 as depicted in SEQ ID NO: 30, a CDR-L3 as depicted in SEQ ID NO: 31.

[0189] In some preferred embodiments, the first binding domain (A) comprises a VH domain comprising the three heavy chain CDRs and a VL domain comprising the three light chain CDRs selected form the group consisting of:
[0190] (a) a CDR-H1 as depicted in SEQ ID NO: 26, a CDR-H2 as depicted in SEQ ID NO: 27, a CDR-H3 as depicted in SEQ ID NO: 28, a CDR-L1 as depicted in SEQ ID NO: 29, a CDR-L2 as depicted in SEQ ID NO: 30, a CDR-L3 as depicted in SEQ ID NO: 31; and
[0191] (b) a CDR-H1 as depicted in SEQ ID NO: 32, a CDR-H2 as depicted in SEQ ID NO: 33, a CDR-H3 as depicted in SEQ ID NO: 34, a CDR-L1 as depicted in SEQ ID NO: 35, a CDR-L2 as depicted in SEQ ID NO: 36, a CDR-L3 as depicted in SEQ ID NO: 37.

[0192] In some preferred embodiments, the first binding domain (A) comprises a pair of VH- and VL-chains having a sequence as depicted in the pairs of sequences selected form the group consisting of SEQ ID NOs: 1 and 5; SEQ ID NOs: 2 and 7, SEQ ID NOs: 3 and 6; and SEQ ID NOs: 4 and 7.

[0193] In some embodiments, the first binding domain (A) comprises a VH domain comprising the following three heavy chain CDRs and a VL domain comprising the following three light chain CDRs: a CDR-H1 as depicted in SEQ ID NO: 38, a CDR-H2 as depicted in SEQ ID NO: 39, a CDR-H3 as depicted in SEQ ID NO: 40, a CDR-L1 as depicted in SEQ ID NO: 41, a CDR-L2 as depicted in SEQ ID NO: 42, a CDR-L3 as depicted in SEQ ID NO: 43.

[0194] In some embodiments, the first binding domain (A) comprises a pair of VH- and VL-chains having a sequence as depicted in the pairs of sequences selected form the group consisting of SEQ ID NOs: 8 and 9.

[0195] Several different antigens can be chosen as the second target (B′) for the selection of the second binding domain (B) of the antibody construct of the disclosure. On the one hand, binding of this second binding domain might boost the functionality of immune effector cells by inducing activation signals or blocking inhibitory signals on e.g. NK cells, macrophages, monocytes, CD8+ T cells through engagement of antigens such as, but not limited to, NKG2D, NKp30, NKp44, NKp46, NKp80, DNAM-1, SLAMF7, OX40, CD137, CD89, CD160, killer-cell immunoglobulin-like receptors (e.g. KIR2DS1-5), CD3, CD96, TIGIT, PD-1, PD-L1, LAG-3, CTLA-4 and TIM-3. Moreover, antigens for the second binding domain can be grouped into different categories depending on the mechanism of action: (1) Antigens inducing an activation in synergy with CD16A such as, but not limited to, NKG2D, NKp30, NKp44, NKp46, NKp80, DNAM-1, SLAMF7, OX40, CD137, CD89, CD160, killer-cell immunoglobulin-like receptors. (2) Antigens inducing activation of effector cells independent of CD16A including such as, but not limited, to NKG2D, NKp30, NKp44, NKp46, NKp80, DNAM-1, SLAMF7, OX40, CD137, CD160 and CD3. (3) Blockage of inhibitory antigens on effector cells comprising e.g. NKG2A, TIGIT, PD-1, PD-L1, CD47, SIRPα, LAG-3, CTLA-4, CD96, TIM-3, CD137, KIR2DL1-5 and KIR3DL1-3 to counteract inhibition and/or functional exhaustion. On the other hand, the second binding domain might reduce the inhibitory functionality of e.g. immunosuppressive cells such as, but not limited to, tumor-associated macrophages, regulatory T cells, myeloid-derived suppressor cells and cancer cells through engagement of antigens such as, but not limited to, CD47, PD-L1 and nectin 4.

[0196] The antigens inducing activation of the effector cells can be additionally classified in groups according the signaling cascade in comparison to CD16A: (1) CD3ζ-dependent/CD16A-associated signaling such as NKp46, NKp30 and (2) CD3ζ-independent signaling such as, but not limited to, NKG2D, NKp44, NKp80, DNAM-1, SLAMF7 and killer-cell immunoglobulin-like receptors (e.g. KIR2DS1).

[0197] Depending on the selection of the antigen for the second binding domain, different cell types will be potentially targeted/activated such as, but not limited to, NK cells with antigens comprising e.g. NKG2D, NKp30, NKp44, NKp46, NKp80, DNAM-1, SLAMF7, OX40, CD137, CD160, KIR2DS1-5, NKG2A, TIGIT, PD-1, PD-L1, CD47, LAG-3, CTLA-4, CD96, TIM-3, CD137, KIR2DL1-5 and KIR3DL1-3; monocytes and macrophages with e.g. CD89, SLAMF7, SIRPα, CD47; T cells with antigens comprising such as CD3, NKG2D, NKp30, NKp44, NKp46, CD160, OX40, CD137, PD-1, PD-L1, LAG-3, CTLA-4, TIM-3 and killer-cell immunoglobulin-like receptors. Moreover, dependent on the antigen different subpopulations (e.g. CD56^{dim}CD16^{bright} NK cells, CD56^{bright}CD16^{negative} NK cells, peripheral or tissue resident NK cells, M1 or M2 macrophages, tumor-associated macrophages, CD16^{pos} or CD16^{neg} monocytes, CD4+ or CD8+ αβT cells, γδ T cells, regulatory T cells and myeloid-derived suppressor cells) can be addressed in combination with CD16A or independent of CD16A.

[0198] In some embodiments, the second binding domain (B) is specific for a CD antigen, with the exception of CD16A. In some embodiments, the second binding domain (B) is capable of specifically binding to a second target (B′) that is selected from the group consisting of CD56, NKG2A, NKG2D, NKp30, NKp44, NKp46, NKp80, DNAM-1, SLAMF7, OX40, CD47/SIRPα, CD89, CD96, CD137, CD160, TIGIT, nectin-4, PD-1, PD-L1, LAG-3, CTLA-4, TIM-3, KIR2DL1-5, KIR3DL1-3, KIR2DS1-5 and CD3.

[0199] Antibodies against such targets are well known in the art. Antibodies against CD56 are e.g. described in WO2012138537 and WO2017023780. Antibodies against NKG2A are e.g. described in WO2008009545, WO2009092805, WO2016032334, WO2020094071, WO2020102501. Antibodies against NKG2D are e.g. described in WO2009077483, WO2018148447, WO2019157366. Antibodies against NKp30 are e.g. described in WO2020172605. Antibodies against NKp46 are e.g. described in WO2011086179 and WO2016209021. Antibodies against DNAM-1 are e.g. described in WO2013140787. Antibodies against SLAMF7 are e.g. described in US2018208653. Antibodies against OX40 are e.g. described in WO2007062245, US2010136030, US2019100596, WO2013008171, WO2013028231. Antibodies against CD47/SIRPα are e.g. described in WO9727873, WO2005044857, US2014161799. Antibodies against CD89 are e.g. described in WO02064634, WO2020084056. Antibodies against CD96 are e.g. described in WO2019091449. Antibodies against CD137 are e.g. described in WO2005035584, WO2006088464, US2006188439. Antibodies against CD160 are e.g. described in US2012003224, US2013122006. Antibodies against TIGIT are e.g. described in US2020040082 and WO2019062832. Antibodies against nectin-4 are e.g. described in WO2018158398. Antibodies against PD-1 are e.g. described in WO2009014708, US2012237522, US2013095098, and US2011229461. Antibodies against PD-L1 are e.g. described in US2012237522, WO2014022758, WO2014055897, and WO2014195852. Antibodies against LAG-3 are e.g. described in WO2008132601, US2016176965, and WO2010019570. Antibodies against CTLA-4 are e.g. described in WO2005092380, US2009252741, and WO2006066568. Antibodies against TIM-3 are e.g. described in US2014134639, WO2011155607, and WO2015117002. Antibodies against KIR2DS1-5 and are e.g. described in WO2016031936. Antibodies against CD3 are e.g. described in U.S. Pat. No. 6,750,325, WO9304187, and WO9516037.

[0200] In some preferred embodiments, the second binding domain (B) is specific for NKG2D and preferably comprises three heavy chain CDRs and three light chain CDRs selected form the group consisting of (a) a CDR-H1 as depicted in SEQ ID NO: 56, a CDR-H2 as depicted in SEQ ID NO: 57, a CDR-H3 as depicted in SEQ ID NO: 58, a CDR-L1 as depicted in SEQ ID NO: 59, a CDR-L2 as depicted in SEQ ID NO: 60, a CDR-L3 as depicted in SEQ ID NO: 61; and (b) a CDR-H1 as depicted in SEQ ID NO: 62, a CDR-H2 as depicted in SEQ ID NO: 63, a CDR-H3 as depicted in SEQ ID NO: 64, a CDR-L1 as depicted in SEQ ID NO: 65, a CDR-L2 as depicted in SEQ ID NO: 66, a CDR-L3 as depicted in SEQ ID NO: 67.

[0201] In some preferred embodiments, the second binding domain (B) comprises a pair of VH- and VL-chains having a sequence as depicted in the pairs of sequences selected form the group consisting of SEQ ID NOs: 15 and 17, SEQ ID NOs: 16 and 17, SEQ ID NOs: 18 and 20, SEQ ID NOs: 19 and 20.

[0202] In some preferred embodiments, the second binding domain (B) is specific for Nkp46 and preferably comprises a VH domain comprising the three heavy chain CDRs and a VL domain comprising the three light chain CDRs selected form the group consisting of (a) a CDR-H1 as depicted in SEQ ID NO: 68, a CDR-H2 as depicted in SEQ ID NO: 69, a CDR-H3 as depicted in SEQ ID NO: 70, a CDR-L1 as depicted in SEQ ID NO: 71, a CDR-L2 as depicted in SEQ ID NO: 72, a CDR-L3 as depicted in SEQ ID NO: 73; and (b) a CDR-H1 as depicted in SEQ ID NO: 74, a CDR-H2 as depicted in SEQ ID NO: 75, a CDR-H3 as depicted in SEQ ID NO: 76, a CDR-L1 as depicted in SEQ ID NO: 77, a CDR-L2 as depicted in SEQ ID NO: 78, a CDR-L3 as depicted in SEQ ID NO: 79.

[0203] In some preferred embodiments, the second binding domain (B) comprises a pair of VH- and VL-chains having a sequence as depicted in the pairs of sequences selected form the group consisting of SEQ ID NOs: 21 and 23, SEQ ID NOs: 22 and 23, and SEQ ID NOs: 24 and 25.

[0204] In some preferred embodiments, the second binding domain (B) is specific for CD89 and preferably comprises a VH domain comprising the three heavy chain CDRs and a VL domain comprising the three light chain CDRs selected form the group consisting of (a) a CDR-H1 as depicted in SEQ ID NO: 460, a CDR-H2 as depicted in SEQ ID NO: 461, a CDR-H3 as depicted in SEQ ID NO: 462, a CDR-L1 as depicted in SEQ ID NO: 463, a CDR-L2 as depicted in SEQ ID NO: 464, a CDR-L3 as depicted in SEQ ID NO: 465; and (b) a CDR-H1 as depicted in SEQ ID NO: 466, a CDR-H2 as depicted in SEQ ID NO: 467, a CDR-H3 as depicted in SEQ ID NO: 468, a CDR-L1 as depicted in SEQ ID NO: 469, a CDR-L2 as depicted in SEQ ID NO: 470, a CDR-L3 as depicted in SEQ ID NO: 471.

[0205] In some preferred embodiments, the second binding domain (B) comprises a pair of VH- and VL-chains having a sequence as depicted in the pairs of sequences selected form the group consisting of SEQ ID NOs: 456 and 457 and SEQ ID NOs: 458 and 459.

[0206] In some embodiments, the third binding domain (C) is specific for a third target (C′) that is a tumor associated antigen. The third target (C′) is preferably selected from the group consisting of CD19, CD20, CD22, CD30, CD33, CD52, CD70, CD74, CD79b, CD123, CLL1, BCMA, FCRH5, EGFR, EGFRvlll, HER2, GD2.

[0207] These cell surface antigens on the surface of target cells are connected with specific disease entities. CD30 is a cell surface antigen characteristic for malignant cells in Hodgkin lymphoma. CD19, CD20, CD22, CD70, CD74 and CD79b are cell surface antigens characteristic for malignant cells in Non-Hodgkin lymphomas (Diffuse large B-cell lymphoma (DLBCL), Mantle cell lymphoma (MCL), Follicular lymphoma (FL), T-cell lymphomas (both peripheral and cutaneous, including transformed mycosis fungoides/Sezary syndrome TMF/SS and Anaplastic large-cell lymphoma (ALCL)). CD52, CD33, CD123, CLL1 are cell surface antigens characteristic for malignant cells in Leukemias (Chronic lymphocytic leukemia (CLL), Acute lymphoblastic leukemia (ALL), Acute myeloid leukemia (AML)). BCMA, FCRH5 are cell surface antigens characteristic for malignant cells in Multiple Myeloma. EGFR, HER2, GD2 are cell surface antigens characteristic for solid cancers (Triple-negative breast cancer (TNBC), breast cancer BC, Colorectal cancer (CRC), Non-small-cell lung carcinoma (NSCLC), Small-cell carcinoma (SCLC also known as “small-cell lung cancer”, or “oat-cell carcinoma”), Prostate cancer (PC), Glioblastoma (also known as glioblastoma multiforme (GBM)).

[0208] Antibodies against such targets are well known in the art. Antibodies against CD19 are e.g. described in WO2018002031, WO2015157286, and WO2016112855. Antibodies against CD20 are e.g. described in WO2017185949, US2009197330, and WO2019164821. Antibodies against CD22 are e.g. described in WO2020014482, WO2013163519, U.S. Ser. No. 10/590,197. Antibodies against CD30 are e.g. described in WO2007044616, WO2014164067, and WO2020135426. Antibodies against CD33 are e.g. described in WO2019006280, WO2018200562, and WO2016201389. Antibodies against CD52 are e.g. described in WO2005042581, WO2011109662, and US2003124127. Antibodies against CD70 are e.g. described in US2012294863, WO2014158821, and WO2006113909. Antibodies against CD74 are e.g. described in WO03074567, US2014030273, and WO2017132617. Antibodies against CD79b are e.g. described in US2009028856, US2010215669, and WO2020088587. Antibodies against CD123 are e.g. described in US2017183413, WO2016116626, and U.S. Ser. No. 10/100,118. Antibodies against CLL1 are e.g. described in WO2020083406. Antibodies against BCMA are e.g. described in WO02066516, U.S. Ser. No. 10/745,486, and US2019112382. Antibodies against FCRH5 are e.g. described in US2013089497. Antibodies against EGFR are e.g. described in WO9520045, WO9525167, and WO02066058. Antibodies against EGFRvlll are e.g. described in WO2017125831. Antibodies against HER2 are e.g. described in US2011189168, WO0105425, and US2002076695. Antibodies against GD2 are e.g. described in WO8600909, WO8802006, and U.S. Pat. No. 5,977,316.

[0209] In some preferred embodiments, the third binding domain (C) is specific for EGFR and preferably comprises a VH domain comprising the following three heavy chain CDRs and a VL domain comprising the following three light chain CDRs: a CDR-H1 as depicted in SEQ ID NO: 44, a CDR-H2 as depicted in SEQ ID NO: 45, a CDR-H3 as depicted in SEQ ID NO: 46, a CDR-L1 as depicted in SEQ ID NO: 47, a CDR-L2 as depicted in SEQ ID NO: 48, a CDR-L3 as depicted in SEQ ID NO: 49.

[0210] In some preferred embodiments, the third binding domain (C) comprises a pair of VH- and VL-chains having a sequence as depicted in the pairs of sequences selected form the group consisting of SEQ ID NOs: 10 and 12 and SEQ ID NOs: 11 and 12.

[0211] In some preferred embodiments, the third binding domain (C) is specific for CD19 and preferably comprises a VH domain comprising the following three heavy chain CDRs and a VH domain comprising the following three light chain CDRs: a CDR-H1 as depicted in SEQ ID NO: 50, a CDR-H2 as depicted in SEQ ID NO: 51, a CDR-H3 as depicted in SEQ ID NO: 52, a CDR-L1 as depicted in SEQ ID NO: 53, a CDR-L2 as depicted in SEQ ID NO: 54, a CDR-L3 as depicted in SEQ ID NO: 55.

[0212] In some preferred embodiments, the third binding domain (C) comprises a pair of VH- and VL-chains having a sequence as depicted in SEQ ID NOs: 13 and 14.

[0213] An antibody construct of the invention is preferably an antibody construct selected from the group consisting of SEQ ID NOs: 161-162; 163-164; 165-166; 167-168; 177-179; 180-182; 183-185; 186-188; 189-191; 192-194; 195-197; 198-200; 225-227; 228-230; 231-233; 234-236 237-238, 239-240, 241-242, 243-244, 245-246, 247-248, 249-250, 251-252; 269-270; 271-272; 273-274; 275-276; 277-278; 279-280; 281-282; 283-284; 293-295; 296-298; 299-301; 302-304; 305-307; 308-310; 311-313; 314-316; 329-331; 332-334; 335-337; 338-340; 353-354; 355-356; 357-358; 359-360; 369-371; 372-374; 375-377; 378-380; 431-433; 434-436; 437-439, 490-492, 493-495, and 500-502.

[0214] An antibody construct of the invention is preferably an variant of an antibody construct selected from the group consisting of SEQ ID NOs: 161-162; 163-164; 165-166; 167-168; 177-179; 180-182; 183-185; 186-188; 189-191; 192-194; 195-197; 198-200; 225-227; 228-230; 231-233; 234-236 237-238, 239-240, 241-242, 243-244, 245-246, 247-248, 249-250, 251-252; 269-270; 271-272; 273-274; 275-276; 277-278; 279-280; 281-282; 283-284; 293-295; 296-298; 299-301; 302-304; 305-307; 308-310; 311-313; 314-316; 329-331; 332-334; 335-337; 338-340; 353-354; 355-356; 357-358; 359-360; 369-371; 372-374; 375-377; 378-380; 431-433; 434-436; 437-439, 490-492, 493-495, and 500-502, wherein the variant has at least 90%, preferably at least 95%, more preferably at least 98%, even more preferably at least 99% sequence identity to any one of these aforementioned antibody constructs, preferably provided that the CDR sequences comprised in these antibody constructs are not altered.

[0215] The present invention also relates to a nucleic acid molecule (DNA and RNA) that includes nucleotide sequences encoding an antibody construct disclosed herein. The present disclosure also encompasses a vector comprising a nucleic acid molecule of the invention. The present invention also encompasses a host cell containing said nucleic acid molecule or said vector. Since the degeneracy of the genetic code permits substitutions of certain codons by other codons specifying the same amino acid, the disclosure is not limited to a specific nucleic acid molecule encoding a antibody construct as described herein but encompasses all nucleic acid molecules that include nucleotide sequences encoding a functional polypeptide. In this regard, the present disclosure also relates to nucleotide sequences encoding the antibody constructs of the disclosure.

[0216] A nucleic acid molecule disclosed in this application may be “operably linked” to a regulatory sequence (or regulatory sequences) to allow expression of this nucleic acid molecule.

[0217] A nucleic acid molecule, such as DNA, is referred to as “capable of expressing a nucleic acid molecule” or capable “to allow expression of a nucleotide sequence” if it includes sequence elements which contain information regarding to transcriptional and/or translational regulation, and such sequences are “operably linked” to the nucleotide sequence encoding the polypeptide. An operable linkage is a linkage in which the regulatory sequence elements and the sequence to be expressed are connected in a way that enables gene expression. The precise nature of the regulatory regions necessary for gene expression may vary among species, but in general these regions include a promoter which, in prokaryotes, contains both the promoter per se, i.e. DNA elements directing the initiation of transcription, as well as DNA elements which, when transcribed into RNA, will signal the initiation of translation. Such promoter regions normally include 5′ non-coding sequences involved in initiation of transcription and translation, such as the −35/−10 boxes and the Shine-Dalgarno element in prokaryotes or the TATA box, CAAT sequences, and 5′-capping elements in eukaryotes. These regions can also include enhancer or repressor elements as well as translated signal and leader sequences for targeting the native polypeptide to a specific compartment of a host cell.

[0218] In addition, the 3′ non-coding sequences may contain regulatory elements involved in transcriptional termination, polyadenylation or the like. If, however, these termination sequences are not satisfactory functional in a particular host cell, then they may be substituted with signals functional in that cell.

[0219] Therefore, a nucleic acid molecule of the disclosure can include a regulatory sequence, such as a promoter sequence. In some embodiments a nucleic acid molecule of the disclosure includes a promoter sequence and a transcriptional termination sequence. Examples of promoters useful for expression in eukaryotic cells are the SV40 promoter or the CMV promoter.

[0220] The nucleic acid molecules of the disclosure can also be part of a vector or any other kind of cloning vehicle, such as a plasmid, a phagemid, a phage, a baculovirus, a cosmid or an artificial chromosome.

[0221] Such cloning vehicles can include, aside from the regulatory sequences described above and a nucleic acid sequence encoding a antibody construct as described herein, replication and control sequences derived from a species compatible with the host cell that is used for expression as well as selection markers conferring a selectable phenotype on transformed or transfected cells. Large numbers of suitable cloning vectors are known in the art, and are commercially available.

[0222] The disclosure also relates to a method for the production of an antibody construct of the disclosure, wherein the antibody construct is produced starting from the nucleic acid coding for the antibody construct or any subunit therein. The method can be carried out in vivo, the polypeptide can, for example, be produced in a bacterial or eukaryotic host organism and then isolated from this host organism or its culture. It is also possible to produce an antibody construct of the disclosure in vitro, for example by use of an in vitro translation system.

[0223] When producing the antibody construct in vivo, a nucleic acid encoding such polypeptide is introduced into a suitable bacterial or eukaryotic host organism by means of recombinant DNA technology. For this purpose, the host cell may be transformed with a cloning vector that includes a nucleic acid molecule encoding an antibody construct as described herein using established standard methods. The host cell may then be cultured under conditions, which allow expression of the heterologous DNA and thus the synthesis of the corresponding polypeptide or antibody construct. Subsequently, the polypeptide or antibody construct is recovered either from the cell or from the cultivation medium.

[0224] Suitable host cells can eukaryotic, such as immortalized mammalian cell lines (e.g., HeLa cells or CHO cells) or primary mammalian cells.

[0225] An antibody construct of the disclosure as described herein may be not necessarily generated or produced only by use of genetic engineering. Rather, such polypeptide can also be obtained by chemical synthesis such as Merrifield solid phase polypeptide synthesis or by in vitro transcription and translation. Methods for the solid phase and/or solution phase synthesis of proteins are well known in the art (see e.g. Bruckdorfer, T. et al. (2004) Curr. Pharm. Biotechnol. 5, 29-43).

[0226] An antibody construct of the disclosure may be produced by in vitro transcription/translation employing well-established methods known to those skilled in the art.

[0227] The invention also provides a composition, preferably a pharmaceutical composition comprising an antibody construct of the invention.

[0228] Certain embodiments provide pharmaceutical compositions comprising the antibody construct defined in the context of the invention and further one or more excipients such as those illustratively described in this section and elsewhere herein. Excipients can be used in the invention in this regard for a wide variety of purposes, such as adjusting physical, chemical, or biological properties of formulations, such as adjustment of viscosity, and or processes of one aspect of the invention to improve effectiveness and or to stabilize such formulations and processes against degradation and spoilage due to, for instance, stresses that occur during manufacturing, shipping, storage, pre-use preparation, administration, and thereafter.

[0229] In certain embodiments, the pharmaceutical composition may contain formulation materials for the purpose of modifying, maintaining or preserving, e.g., the pH, osmolarity, viscosity, clarity, color, isotonicity, odor, sterility, stability, rate of dissolution or release, adsorption or penetration of the composition (see, REMINGTON'S PHARMACEUTICAL SCIENCES, 18″ Edition, (A.R. Genrmo, ed.), 1990, Mack Publishing Company). In such embodiments, suitable formulation materials may include, but are not limited to:
[0230] amino acids such as glycine, alanine, glutamine, asparagine, threonine, proline, 2-phenylalanine, including charged amino acids, preferably lysine, lysine acetate, arginine, glutamate and/or histidine
[0231] antimicrobials such as antibacterial and antifungal agents
[0232] antioxidants such as ascorbic acid, methionine, sodium sulfite or sodium hydrogen-sulfite;
[0233] buffers, buffer systems and buffering agents which are used to maintain the composition at physiological pH or at a slightly lower pH; examples of buffers are borate, bicarbonate,
[0234] Tris-HCl, citrates, phosphates or other organic acids, succinate, phosphate, and histidine; for example Tris buffer of about pH 7.0-8.5;
[0235] non-aqueous solvents such as propylene glycol, polyethylene glycol, vegetable oils such as olive oil, and injectable organic esters such as ethyl oleate;
[0236] aqueous carriers including water, alcoholic/aqueous solutions, emulsions or suspensions, including saline and buffered media;
[0237] biodegradable polymers such as polyesters;
[0238] bulking agents such as mannitol or glycine;
[0239] chelating agents such as ethylenediamine tetraacetic acid (EDTA);
[0240] isotonic and absorption delaying agents;
[0241] complexing agents such as caffeine, polyvinylpyrrolidone, beta-cyclodextrin or hydroxypropyl-beta-cyclodextrin)
[0242] fillers;
[0243] monosaccharides; disaccharides; and other carbohydrates (such as glucose, mannose or dextrins); carbohydrates may be non-reducing sugars, preferably trehalose, sucrose, octasulfate, sorbitol or xylitol;
[0244] (low molecular weight) proteins, polypeptides or proteinaceous carriers such as human or bovine serum albumin, gelatin or immunoglobulins, preferably of human origin;
[0245] coloring and flavouring agents;
[0246] sulfur containing reducing agents, such as glutathione, thioctic acid, sodium thioglycolate, thioglycerol, [alpha]-monothioglycerol, and sodium thio sulfate
[0247] diluting agents;
[0248] emulsifying agents;
[0249] hydrophilic polymers such as polyvinylpyrrolidone)
[0250] salt-forming counter-ions such as sodium;
[0251] preservatives such as antimicrobials, anti-oxidants, chelating agents, inert gases and the like; examples are: benzalkonium chloride, benzoic acid, salicylic acid, thimerosal, phenethyl alcohol, methylparaben, propylparaben, chlorhexidine, sorbic acid or hydrogen peroxide);
[0252] metal complexes such as Zn-protein complexes;
[0253] solvents and co-solvents (such as glycerin, propylene glycol or polyethylene glycol);
[0254] sugars and sugar alcohols, such as trehalose, sucrose, octasulfate, mannitol, sorbitol or xylitol stachyose, mannose, sorbose, xylose, ribose, myoinisitose, galactose, lactitol, ribitol, myoinisitol, galactitol, glycerol, cyclitols (e.g., inositol), polyethylene glycol; and polyhydric sugar alcohols;
[0255] suspending agents;
[0256] surfactants or wetting agents such as pluronics, PEG, sorbitan esters, polysorbates such as polysorbate 20, polysorbate, triton, tromethamine, lecithin, cholesterol, tyloxapal; surfactants may be detergents, preferably with a molecular weight of >1.2 KD and/or a polyether, preferably with a molecular weight of >3 KD; non-limiting examples for preferred detergents are Tween 20, Tween 40, Tween 60, Tween 80 and Tween 85; non-limiting examples for preferred polyethers are PEG 3000, PEG 3350, PEG 4000 and PEG 5000;
[0257] stability enhancing agents such as sucrose or sorbitol;
[0258] tonicity enhancing agents such as alkali metal halides, preferably sodium or potassium chloride, mannitol sorbitol;
[0259] parenteral delivery vehicles including sodium chloride solution, Ringer's dextrose, dextrose and sodium chloride, lactated Ringer's, or fixed oils;
[0260] intravenous delivery vehicles including fluid and nutrient replenishers, electrolyte replenishers (such as those based on Ringer's dextrose).

[0261] It is evident to those skilled in the art that the different constituents of the pharmaceutical composition (e.g., those listed above) can have different effects, for example, and amino acid can act as a buffer, a stabilizer and/or an antioxidant; mannitol can act as a bulking agent and/or a tonicity enhancing agent; sodium chloride can act as delivery vehicle and/or tonicity enhancing agent; etc.

[0262] In certain embodiments, the optimal pharmaceutical composition will be determined by one skilled in the art depending upon, for example, the intended route of administration, delivery format and desired dosage. See, for example, REMINGTON'S PHARMACEUTICAL SCIENCES, supra. For example, a suitable vehicle or carrier may be water for injection, physiological saline solution or artificial cerebrospinal fluid, possibly supplemented with other materials common in compositions for parenteral administration. Neutral buffered saline or saline mixed with serum albumin are further exemplary vehicles.

[0263] In one embodiment of the pharmaceutical composition according to one aspect of the invention the composition is administered to a patient intravenously.

[0264] Methods and protocols for the intravenous (iv) administration of pharmaceutical compositions described herein are well known in the art.

[0265] The antibody construct of the invention and/or pharmaceutical composition of the invention is preferably used in the prevention, treatment or amelioration of a disease selected from a proliferative disease, a tumorous disease, a viral disease or an immunological disorder. Preferably, said tumorous disease is a malignant disease, preferably cancer.

[0266] In one embodiment of the pharmaceutical composition of the invention the identified malignant disease is selected from the group consisting of Hodgkin lymphoma, Non-Hodgkin lymphoma, leukemia, multiple myeloma and solid tumors.

[0267] The present invention also provides a method for the treatment or amelioration of a disease, the method comprising the step of administering to a subject in need thereof an antibody construct according to the invention.

[0268] In one embodiment of said method for the treatment or amelioration of a disease the subject suffers from a proliferative disease, a tumorous disease, an infectious disease such as a viral disease, or an immunological disorder. It is preferred that said tumorous disease is a malignant disease, preferably cancer.

[0269] In one embodiment of said method for the treatment or amelioration of a disease said malignant disease is selected from the group consisting of Hodgkin lymphoma, Non-Hodgkin lymphoma, leukemia, multiple myeloma and solid tumors.

[0270] The present invention also relates to a method of simultaneously binding a target cell and an immune effector cell, comprising administering to a subject the antibody construct of the invention, wherein the antibody construct binds the tumor cell and a first immune effector cell but does not essentially bind a further immune effector cell. Such a method preferably for the treatment or amelioration of a disease defined herein. Simultaneously binding of a target cell and an immune effector cell preferably comprises target cell specific activation of the immune effector cell. In some embodiments, the first binding domain and the second binding domain preferably bind to a first target (A′) and a second target (B′) that are on the same first immune effector cell. In some embodiments, only one of the first binding domain (A) and the second binding domain (B) binds to an immune effector cell, in particular if the first target (A′) and the second target (B′) are expressed on two different immune effector cells.

[0271] The present invention also relates to a kit comprising an antibody construct of the invention, a nucleic acid molecule of the invention, a vector of the invention or a host cell of the invention. The kit of the invention will typically comprise a container comprising the antibody construct of the invention, the nucleic acid molecule of the invention, the vector of the invention, or the host cell of the invention, and optionally one or more other containers comprising materials desirable from a commercial and user standpoint, including buffers, diluents, filters, needles, syringes, and package inserts with instructions for use.

[0272] The invention is further characterized by the following items.

[0273] Item 1. A trispecific antibody construct comprising (i) a first binding domain (A), which is capable of specifically binding to a first target (A′) that is CD16A on the surface of an immune effector cell; (ii) a second binding domain (B), which is capable of specifically binding to a second target (B′) that is another antigen on the surface of an immune effector cell, wherein said antigen is selected from the group comprising CD56, NKG2A, NKG2D, NKp30, NKp44, NKp46, NKp80, DNAM-1, SLAMF7, OX40, CD47/SIRPα, CD89, CD96, CD137, CD160, TIGIT, nectin-4, PD-1, PD-L1, LAG-3, CTLA-4, TIM-3, KIR2DL1-5, KIR3DL1-3, KIR2DS1-5 and CD3; and (iii) a third binding domain (C), which is capable of specifically binding to a third target (C′) that is an antigen on the surface of a target cell.

[0274] Item 2. The antibody construct of item 1, wherein the first binding domain (A) and the second binding domain (B) are positioned to each other in a way that simultaneous binding of two immune effector cells is reduced or preferably prevented.

[0275] Item 3. The antibody construct of item 1 or 2, wherein the antibody construct binds to a target cell and one immune effector cell simultaneously.

[0276] Item 4. The antibody construct of the preceding items, further comprising a fourth domain (D) comprising a half-life extension domain.

[0277] Item 5. The antibody construct of item 4, wherein said half-life extension domain comprises a CH2 domain, wherein the Fcγ receptor binding domain is silenced.

[0278] Item 6. The antibody construct of item 4 or 5, wherein said half-life extension domain comprises a CH3 domain.

[0279] Item 7. The antibody construct of any one of items 4 to 6, wherein the antibody construct comprise at least one hinge domain and CH3 domain fused to a CH2 domain in an amino to carboxyl order in the order hinge domain-CH2 domain-CH3 domain.

[0280] Item 8. The antibody construct of any one of items 4 to 7, wherein the antibody construct comprises at least two of the hinge domain-CH2 domain-CH3 domain elements.

[0281] Item 9. The antibody construct of any one of the preceding items, wherein the third binding domain (C) comprises an VH and a VL domain of an antibody.

[0282] Item 10. The antibody construct of any one of the preceding items, wherein the third binding domain (C) binds to an antigen on the surface of a target cell, which antigen is selected from the group consisting of CD19, CD20, CD22, CD30, CD33, CD52, CD70, CD74, CD79b, CD123, CLL1, BCMA, FCRH5, EGFR, EGFRvlll, HER2, and GD2.

[0283] Item 11. The antibody construct of any one of the preceding items, wherein the second binding domain (B) comprises an VH and a VL domain of an antibody.

[0284] Item 12. The antibody construct of any one of the preceding items, wherein the first binding domain (A) comprises an VH and a VL domain of an antibody.

[0285] Item 13. The antibody construct of any one of the preceding items, wherein the first binding domain (A) binds to an epitope on CD16A which is C-terminal to the physiological Fcγ receptor binding domain, said epitope preferably comprises Y158 of SEQ ID NO: 449.

[0286] Item 14. The antibody construct of any one of the preceding items, wherein the first binding domain (A) is fused to the C terminus of a first CH3 domain and the second binding domain (B) is fused to the C terminus of a second CH3 domain.

[0287] Item 15. The antibody construct of item 14, wherein the antibody construct is monovalent for the first binding domain (A) and monovalent for the second binding domain (B).

[0288] Item 16. The antibody construct of any one of items 1 to 13, wherein the first binding domain (A) is fused to the N-terminus of a first hinge and the second binding domain (B) is fused to the N-terminus of a second hinge.

[0289] Item 17. The antibody construct of any one of items 1 to 13, wherein the first binding domain (A) and the second binding domain (B) are fused to each other.

[0290] Item 18. The antibody construct of item 17, wherein the antibody construct is monovalent for the first binding domain (A) and monovalent for the second binding domain (B).

[0291] Item 19. The antibody construct of item 17, wherein the antibody construct is bivalent for the first binding domain (A) and bivalent for the second binding domain (B), wherein each of the first binding domains (A) is fused to a second binding domain (B).

[0292] Item 20. The antibody construct of any one of items 17 to 19, wherein the C terminus of the VL of the first binding domain (A) is fused to the N terminus of the VH of the second binding domain (B) and the C terminus of the VL of the second binding domain (B) is fused to the N terminus of the VH of the first binding domain (A).

[0293] Item 21. The antibody construct of any one of items 17 to 19, wherein the N terminus of the VL of the first binding domain (A) is fused to the C terminus of the VH of the second binding domain (B) and the N terminus of the VL of the second binding domain (B) is fused to the C terminus of the VH of the first binding domain (A).

[0294] Item 22. The antibody construct of any one of items 17 to 19, wherein the C terminus of the VL of the first binding domain (A) is fused to the N terminus of the VL of the second binding domain (B) and the C terminus of the VH of the first binding domain (A) is fused to the N terminus of the VH of the second binding domain (B).

[0295] Item 23. The antibody construct of any one of items 17 to 19, wherein the C terminus of the VL of the second binding domain (B) is fused to the N terminus of the VL of the first binding domain (A) and the C terminus of the VH of the second binding domain (B) is fused to the N terminus of the VH of the first binding domain (A).

[0296] Item 24. The antibody construct of any one of items 17 to 19, wherein the first binding domain (A) and the second binding domain (B) are fused to each other in form of a bi-scFv, double Fab, db or scDb.

[0297] Item 25. The antibody construct of item 24, wherein the first binding domain (A) and the second binding domain (B) are fused to each other in form of a db or scDb.

[0298] Item 26. The antibody construct of item 25, wherein the variable domains of the db or scDb are arranged in V_{L}-V_{H}-V_{L}-V_{H} order.

[0299] Item 27. The antibody construct of any one of items 16 to 26, wherein (a) the first binding domain (A) is fused N-terminally to a hinge domain and the second binding domain (B) is fused N-terminally to the first binding domain (A); or (b) the first binding domain (A) is fused C-terminally to a CH3 domain and the second binding domain (B) is fused C-terminally to the first binding domain.

[0300] Item 28. The antibody construct of any one of items 16 to 27, wherein the first binding domain (A) is fused N-terminally to a hinge domain and the second binding domain (B) is fused N-terminally to the first binding domain (A).

[0301] Item 29. The antibody construct of any one of the preceding items, wherein the binding site of the first binding domain (A) and the binding site of the second binding domain (B) are within a distance of about 25 nm or less, preferably about 20 nm or less, preferably about 15 nm or less, preferably about 10 nm or less.

[0302] Item 30. The antibody construct of any one of the preceding items, wherein the binding site of the first binding domain (A) and the binding site of the second binding domain (B) are in cis orientation.

[0303] Item 31. The antibody construct of any one of the preceding items, wherein the binding site of the first binding domain (A) and the binding site of the third binding domain (C) are in trans orientation.

[0304] Item 32. The antibody construct of any one of the preceding items, wherein the binding site of the second binding domain (B) and the binding site of the third binding domain (C) are in trans orientation.

[0305] Item 33. The antibody construct of any one of the preceding items, wherein the first binding domain (A) comprises:
[0306] (i) a VL region comprising CDR-L1, CDR-L2 and CDR-L3 selected from:
   [0307] (a) CDR-L1 as depicted in SEQ ID NO: 29, a CDR-L2 as depicted in SEQ ID NO: 30, a CDR-L3 as depicted in SEQ ID NO: 31; and
   [0308] (b) CDR-L1 as depicted in SEQ ID NO: 35, a CDR-L2 as depicted in SEQ ID NO: 36, a CDR-L3 as depicted in SEQ ID NO: 37;
[0309] (ii) a VH region comprising CDR-H1, CDR-H2 and CDR-H3 selected from:
   [0310] (a) CDR-H1 as depicted in SEQ ID NO: 26, a CDR-H2 as depicted in SEQ ID NO: 27, a CDR-H3 as depicted in SEQ ID NO: 28; and
   [0311] (b) a CDR-L1 as depicted in SEQ ID NO: 29, a CDR-L2 as depicted in SEQ ID NO: 30, a CDR-L3 as depicted in SEQ ID NO: 31.

[0312] Item 34. The antibody construct of any one of the preceding items, having an amino acid sequence selected from the group consisting of SEQ ID NOs: 161-162; 163-164; 165-166; 167-168; 177-179; 180-182; 183-185; 186-188; 189-191; 192-194; 195-197; 198-200; 225-227; 228-230; 231-233; 234-236 237-238, 239-240, 241-242, 243-244, 245-246, 247-248, 249-250, 251-252; 269-270; 271-272; 273-274; 275-276; 277-278; 279-280; 281-282; 283-284; 293-295; 296-298; 299-301; 302-304; 305-307; 308-310; 311-313; 314-316; 329-331; 332-334; 335-337; 338-340; 353-354; 355-356; 357-358; 359-360; 369-371; 372-374; 375-377; 378-380; 431-433; 434-436; 437-439, 490-492, 493-495, and 500-502.

[0313] Item 35. The antibody construct of and one of the preceding items, wherein the antibody construct induces a lower degree of fratricide as compared to a control construct selected from the group consisting of SEQ ID NOs: 393-395; 396-398; 399-401; 402-404; 405-407; 408-410; 411-413; 414-416; 417-419; 420-422; 423-425; and 426-428.

[0314] Item 36. The antibody construct of any one of the preceding items, wherein the antibody construct induces a lower degree of fratricide as compared to the anti-CD38 antibody of SEQ ID NOs: 429 and 430.

[0315] Item 37. The antibody construct of any one of the preceding items, wherein the antibody construct induces about 25% or less NK cell fratricide in a cytotoxicity assay.

[0316] Item 38. A nucleic acid molecule comprising a sequence encoding an antibody construct of any one of items 1 to 37.

[0317] Item 39. A vector comprising a nucleic acid molecule of item 38.

[0318] Item 40. A host cell comprising a nucleic acid molecule of item 38 or a vector of item 39.

[0319] Item 41. A method of producing an antibody construct of any one of items 1 to 37, said method comprising culturing a host cell of item 40 under conditions allowing the expression of the antibody construct of any one of items 1 to 37 and recovering the produced antibody construct from the culture.

[0320] Item 42. A pharmaceutical composition comprising an antibody construct of any one of items 1 to 37, or produced of the method of item 41.

[0321] Item 43. An antibody construct of any one of items 1 to 37 for use in therapy.

[0322] Item 44. The antibody construct of any one of items 1 to 37, or produced of the method of item 41, for use in the prevention, treatment or amelioration of a disease selected from a proliferative disease, a tumorous disease, a viral disease or an immunological disorder.

[0323] Item 45. A method of treatment or amelioration of a proliferative disease, a tumorous disease, a viral disease or an immunological disorder, comprising the step of administering to a subject in need thereof the antibody construct of any one of items 1 to 37, or produced of the process of item 41.

[0324] Item 46. A kit comprising an antibody construct of any one of items 1 to 37, or produced of the method of item 41, a nucleic acid molecule of item 38, a vector of item 39, and/or a host cell of item 40.

[0325] Item 47. A method of simultaneously binding a target cell and an immune effector cell, comprising administering to a subject the antibody construct of any one of items 1 to 37, wherein the antibody construct binds the tumor cell and a first immune effector cell but does not essentially bind a further immune effector cell.

[0326] Item 48. The method of item 47, wherein the first binding domain and the second binding domain bind to a first target (A′) and a second target (B′) that are on the same first immune effector cell.

[0327] Item 49. The method of item 47 or 48, wherein the method comprises target cell specific activation of the first immune effector cell.

[0328] It must be noted that as used herein, the singular forms “a”, “an”, and “the”, include plural references unless the context clearly indicates otherwise. Thus, for example, reference to “a reagent” includes one or more of such different reagents and reference to “the method” includes reference to equivalent steps and methods known to those of ordinary skill in the art that could be modified or substituted for the methods described herein.

[0329] Unless otherwise indicated, the term “at least” preceding a series of elements is to be understood to refer to every element in the series. Those skilled in the art will recognize, or be able to ascertain using no more than routine experimentation, many equivalents to the specific embodiments of the invention described herein. Such equivalents are intended to be encompassed by the present invention.

[0330] The term “and/or” wherever used herein includes the meaning of “and”, “or” and “all or any other combination of the elements connected by said term”.

[0331] The term “about” or “approximately” as used herein means within 10%, preferably within 5%, more preferably within 2%, even more preferably within 1% of a given value or range (plus (+) or minus (−)). It includes, however, also the concrete number, e.g., about 20 includes 20.

[0332] The term “less than” or “greater than” includes the concrete number. For example, less than 20 means less than or equal to. Similarly, more than or greater than means more than or equal to, or greater than or equal to, respectively.

[0333] Throughout this specification and the claims which follow, unless the context requires otherwise, the word “comprise”, and variations such as “comprises” and “comprising”, will be understood to imply the inclusion of a stated integer or step or group of integers or steps but not the exclusion of any other integer or step or group of integer or step. When used herein the term “comprising” can be substituted with the term “containing” or “including” or sometimes when used herein with the term “having”.

[0334] When used herein “consisting of” excludes any element, step, or ingredient not specified in the claim element. When used herein, “consisting essentially of” does not exclude materials or steps that do not materially affect the basic and novel characteristics of the claim.

[0335] In each instance herein, any of the terms “comprising”, “consisting essentially of” and “consisting of” may be replaced with either of the other two terms. For example, the disclosure of the term “comprising” includes the disclosure of the terms “consisting essentially of” as well as the disclosure of the term “consisting of”.

[0336] It should be understood that this invention is not limited to the particular methodology, protocols, material, reagents, and substances, etc., described herein and as such can vary. The terminology used herein is for the purpose of describing particular embodiments only, and is not intended to limit the scope of the present invention, which is defined solely by the claims.

[0337] All publications and patents cited throughout the text of this specification (including all patents, patent applications, scientific publications, manufacturer's specifications, instructions, etc.), whether supra or infra, are hereby incorporated by reference in their entirety. Nothing herein is to be construed as an admission that the invention is not entitled to antedate such disclosure by virtue of prior invention. To the extent the material incorporated by reference contradicts or is inconsistent with this specification, the specification will supersede any such material.

[0338] A better understanding of the present invention and of its advantages will be obtained from the following examples, offered for illustrative purposes only. The examples are not intended to limit the scope of the present invention in any way.

### EXAMPLES

### Example 1: Culture of Transfected CHO Cells

[0339] Stably transfected CHO cells expressing recombinant cell surface anchored CD16A, CD16B, CD32, CD64, NKp46, NKG2D, or other innate cell receptors, or EGFR, CD19, HER2, CD30, CD33, or other tumor target antigens were cultured in HyClone CDM4 CHO (Cytiva Lifesciences, cat. SH30557.02) supplemented with 2 mM L-Glutamine (Life Technologies, cat. 25030-024) and 0.5× HT supplement (Life Technologies, cat. 41065-012). To maintain stable recombinant antigen expression, culture media was supplemented with selection antibiotics, e.g. 7 μg/mL Puromycin (Fisher Scientific, cat. A1113803) or 500 μg/mL Hygromycin B (Fisher Scientific, cat. 10687010). Suspension cultures were seeded at a density of 3×10⁵ viable cells/mL for a subsequent 3-day passage, or 6×10⁵ viable cells/mL for a subsequent 2-day passage.

### Example 2: Culture of Cell Lines

[0340] EGFR⁺ tumor cells, e.g. A-431 (DSMZ; cat.: ACC 91) or SW-982 (ATCC; cat.: HTB-93) and CD19⁺ GRANTA-519 cells (DSMZ; cat.: ACC 342) were cultured under standard conditions in DMEM medium supplemented with 10% heat-inactivated FCS, 2 mM L-glutamine and 100 IU/mL penicillin G sodium and 100 μg/mL streptomycin sulfate (all components from Invitrogen) as recommended by the supplier. CD32⁺/CD64⁺ tumor cells, e.g. THP-1 (DSMZ; ACC 16), and CD19⁺ tumor cells, e.g. Raji (DSMZ, cat.: ACC 319) were cultured under standard conditions in RPMI 1640 medium supplemented with 10% heat-inactivated FCS, 2 mM L-glutamine and 100 IU/mL penicillin G sodium and 100 μg/mL streptomycin sulfate (all components from Invitrogen). The HER2⁺ SK-BR-3 cell line was purchased from DSMZ (cat.: ACC 736) and cultured in McCoy's medium (ATCC, cat.: ATCC30-2007) supplemented with 20% heat-inactivated FCS, 2 mM L-glutamine and 100 IU/mL penicillin G sodium and 100 μg/mL streptomycin sulfate (all components from Invitrogen). All cell lines were cultured at 37° C. in a humidified atmosphere with 5% CO₂.

### Example 3: Isolation of PBMC from Buffy Coats

[0341] Peripheral blood mononuclear cells (PBMC) were isolated from buffy coats (German Red Cross, Mannheim, Germany) by density gradient centrifugation. The buffy coat samples were diluted with a two-to-threefold volume of PBS (Invitrogen, cat.: 14190-169), layered on a cushion of Lymphoprep (Stem Cell Technologies, cat.: 07861) SepMate™-50 (IVD) tubes (Stem Cell Technologies, cat.: 85460), and centrifuged at 800×g for 25 min at room temperature w/o brake. PBMC located in the interface were collected and washed three times with PBS before use. Where indicated, PBMC were cultured overnight without stimulation in complete RPMI 1640 medium (RPMI 1640 medium supplemented 10% heat-inactivated FCS, 2 mM L-glutamine and 100 IU/mL penicillin G sodium and 100 μg/mL streptomycin sulfate (all components from Invitrogen).

### Example 4: Enrichment of Human NK Cells or T Cells and Depletion of B Cells from PBMC

[0342] For the immunomagnetic enrichment of untouched primary human NK or T cells, PBMC were harvested from overnight cultures and used for one or two rounds of negative selection using the EasySep™ Human NK Cell Enrichment Kit (Stem Cell Technologies, cat.: 17055) or the EasySep™ Human T Cell Enrichment Kit (Stem Cell Technologies, cat.: 19051) with the Big Easy EasySep™ Magnet (Stem Cell Technologies, cat.: 18001) according to the manufacturer's instructions.

[0343] For the depletion of CD19⁺ cells from PBMC, PBMC were subjected to one or two rounds of B cell depletion using the B cell EasySep™ Human CD19 Positive Selection Kit (Stem Cell Technologies, cat: 18054) according to manufacturer's instructions.

### Example 5: Assessment of Purity of Enriched NK Cells by Flow Cytometry

[0344] Aliquots of e.g. 1×10⁶ enriched human NK cells were washed in FACS buffer (PBS (Invitrogen, cat.: 14190-169) containing 2% heat-inactivated FCS (Invitrogen, cat.: 10270-106), and 0.1% sodium azide (Roth, Karlsruhe, Germany, cat.: A1430.0100)), and were then resuspended in FACS/hIgG buffer (FACS buffer (PBS containing 2% heat-inactivated FCS, and 0.1% sodium azide) supplemented with 1 mg/mL polyclonal human IgG (hIgG, e.g. Cutaquig, Octapharma)) containing the antibody panel for immunophenotyping presented in Table 2.

TABLE 2
Antibody panel for immunophenotyping

| Reagent | Supplier | Cat. |
|---|---|---|
| Viability dye eFluor780 | Thermo Fisher | 65-0865-14 |
| CD3-BV510 (UCHT-1) | Biolegend | 300448 |
| CD19-ECD (J3-119) | Beckman Coulter | A07770 |
| CD56-PE (N901) | Beckman Coulter | A07788 |
| CD66b-Alexa647 (G10F5) | Biolegend | 305110 |
| CD16-BV421 (3G8) | BioLegend | 302038 |
| CD45-BV605 (HIT30) | Biolegend | 304042 |
| CD14-PC7 (RMO52) | Beckman Coulter | A22331 |
| CD16-158V-FITC (MEM-154) | Thermo Fisher | MA1-19563 |
| CD8-BV785 (SK1) | Biolegend | 344740 |

[0345] After incubation for 30 min on ice in the dark, cells were washed twice in FACS buffer, and were then resuspended in PBS. Cells were then analyzed using a standardized 10-color protocol using a CytoFlex 3L flow cytometer (Beckman Colter) to determine the purity of enriched NK cells and the relative amount of other cell subsets. The purity of enriched NK cells after one round of negative selection was typically >80% CD16⁺/CD56⁺ cells of total cells. An exemplary dot plot from an NK cell enrichment experiment is shown in FIG. 13.

### Example 6: Cell Binding Assays and Flow Cytometric Analysis

[0346] Aliquots of 1×10⁵ to 1×10⁶ of the indicated cells were incubated with 100 μL of the indicated antibody constructs at the indicated concentrations, e.g. 10 μg/mL or 100 μg/mL, in FACS buffer (PBS (Invitrogen, cat.: 14190-169) containing 2% heat-inactivated FCS (Invitrogen, cat.: 10270-106), and 0.1% sodium azide (Roth, Karlsruhe, Germany, cat.: A1430.0100)) for 45 min at 37° C. After repeated washing with FACS buffer, cell-bound antibodies were detected with fluorescence-labeled secondary reagents, e.g. 15 μg/mL FITC-conjugated goat anti-human IgG Fc (Dianova, cat.: 109-095-098). Fluorescence-labeled mAbs specific for CD16 (clone 3G8, Biolegend), CD32 (clone FLI8.26, BD Biosciences), CD64 (clone 10.1, Biolegend), NKp46 (clone 9E2, BD Bioscience), and NKG2D (clone 1D11, Biolegend) were used as controls. After the last staining step, the cells were washed again and resuspended in 0.2 mL of FACS buffer. The median fluorescence intensity (MFI) of 0.5-5×10⁴ cells was measured using a Beckman Coulter CytoFLEX or CytoFLEX S flow cytometer using CytExpert software (Beckman Coulter, Krefeld, Germany). The MFI of the cell samples were calculated using CytExpert software (Beckman Coulter). Binding histograms of the antibodies to cells were plotted using FlowJo software (version 10.7 for Windows, FlowJo LLC, Ashland, OR, USA). In case of staining of the cells with serial dilutions, the fluorescence intensity values of the cells stained with the secondary reagents alone were subtracted, and the values were used for non-linear regression analysis and plotting dose-response curves using the GraphPad Prism software (version 7.04 for Windows, GraphPad Software, San Diego, CA, USA).

### Example 7: 4 h Calcein-Release Cytotoxicity Assays on Tumor Cell Lines as Target Cells

[0347] For calcein-release cytotoxicity assays the indicated target cells were harvested from cultures, washed with RPMI 1640 medium without FCS, and labeled with 10 μM calcein AM (Invitrogen/Molecular Probes, cat.: C3100MP) for 30 min in RPMI 1640 medium without FCS at 37° C. After gently washing, the labeled cells were resuspended in complete RPMI 1640 medium (RPMI 1640 medium supplemented with 10% heat-inactivated FCS, 4 mM L-glutamine, 100 U/mL penicillin G sodium, 100 μg/mL streptomycin sulfate) to a density of 1×10⁵/mL. 1×10⁴ target cells were then seeded together with enriched primary human NK cells at an E:T ratio of 5:1 or unfractionated human PBMC at an E:T ratio of 50:1 in the presence of serial dilutions of the indicated antibodies, preferentially in the range between 1 ng/mL and 30 μg/mL, in individual wells of a round-bottom 96-well microplate in a total volume of 200 μL/well in duplicates. Spontaneous release, maximal release and killing of targets by effectors in the absence of antibodies were determined in quadruplicate on each plate. For induction of maximal calcein-release Triton X-100 was added to the respective wells at a final concentration of 1%.

[0348] After centrifugation for 2 min at 200×g the assay was incubated for 4 h at 37° C. in a humidified atmosphere with 5% CO₂. 100 μL cell culture supernatant were harvested from each well after an additional centrifugation for 5 min at 500×g, transferred to a black flat-bottom microplate, and the fluorescence of the released calcein was measured at 520 nm using a fluorescence plate reader (EnSight, Perkin Elmer, Waltham, MA, USA). On the basis of the measured counts, the specific cell lysis was calculated according to the following formula: [fluorescence (sample)−fluorescence (spontaneous)]/[fluorescence (maximum)−fluorescence (spontaneous)]×100%. Fluorescence (spontaneous) represents the fluorescent counts from target cells in the absence of effector cells and antibodies and fluorescence (maximum) represents the total cell lysis induced by the addition of Triton X-100. Sigmoidal dose response curves and EC₅₀ values were calculated by non-linear regression/4-parameter logistic fit using the GraphPad Prism software and plotted. The graph of one representative experiment is shown in FIG. 18.

TABLE 3
Potency (EC₅₀) and efficacy (Eₘₐₓ) values determined for trispecific constructs
in 4 h calcein release assays where primary human NK cells were incubated with
calcein-labeled CD19⁺ GRANTA-519 or EGFR⁺ A-431 tumor cells at an
effector:target cell ratio of 5:1 in presence of a serial dilution of the
indicated antibodies. Experiments were performed in duplicates and the resulting
mean and SD values are depicted in the table (n.a. = not applicable)

| | | Effector | Effector | EC50 [pM] | | Eₘₐₓ [%] | |
|---|---|---|---|---|---|---|---|
| Construct | Target | domain 1 | domain 2 | mean | SD | mean | SD |
| IG-scDb-1 | CD19 | P2C47var50 | KYK-2.0 | 14.2 | 10.1 | 45.4 | 6.5 |
| IG-scDb-2 | CD19 | P2C47var50 | ADI-27743 | 12.8 | 5.5 | 24.1 | 6.9 |
| IG-scDb-3 | CD19 | P2C47var50 | NKp46-1 | 5.6 | 1.8 | 40.2 | 1.8 |
| 2Fab-1scDb-AFc-1 | CD19 | ABC1197var8 | KYK-2.0 | 21.4 | 4.0 | 54.8 | 6.1 |
| 2Fab-1scDb-AFc-3 | CD19 | ABC1197var8 | NKp46-1 | 11.2 | 1.6 | 55.4 | 1.6 |
| 2Fab-1scDb-AFc-4 | CD19 | ABC1197var8 | NKp46-3 | 16.1 | 6.8 | 52.1 | 4.8 |
| 1Fab-1scDb-AFc-1 | CD19 | ABC1197var8 | KYK-2.0 | 7.6 | 0.9 | 55.1 | 1.9 |
| 1Fab-1scDb-AFc-3 | CD19 | ABC1197var8 | NKp46-1 | 5.6 | 2.3 | 70.5 | 4.1 |
| AIG-2scFv-16 | CD19 | ABC1197var8 | KYK-2.0 | 10.9 | 4.0 | 32.9 | 5.2 |
| AIG-2scFv-17 | CD19 | ABC1197var8 | ADI-27743 | 6.4 | 2.7 | 33.4 | 8.2 |
| AIG-2scFv-18 | CD19 | ABC1197var8 | NKp46-1 | 7.4 | 0.9 | 32.8 | 6.8 |
| AIG-2scFv-19 | CD19 | ABC1197var8 | NKp46-3 | 12.1 | 3.8 | 37.3 | 6.3 |
| AIG-2scFv-23 | CD19 | 3G8 | NKp46-3 | 7.1 | n.a. | 10.1 | 5.0 |
| AIG-2scDb-4 | CD19 | P2C47var50 | NKp46-3 | 5.7 | 0.9 | 35.8 | 4.1 |
| 2scDb-AFc-3 | CD19 | ABC1197var6 | NKp46-1 | 9.3 | 4.0 | 65.7 | 0.0 |
| 2tascFv-AFc-2 | CD19 | ABC1197var8 | ADI-27743 | 12.5 | 1.7 | 65.6 | 3.4 |
| 2Fab-scFc-1scDb-1 | CD19 | ABC1197var8 | KYK-2.0 | 34.7 | 4.3 | 41.3 | 10.9 |
| 2Fab-scFc-1scDb-2 | CD19 | ABC1197var8 | ADI-27743 | 57.0 | 8.5 | 48.4 | 7.9 |
| 2Fab-scFc-1scDb-3 | CD19 | ABC1197var8 | NKp46-1 | 21.5 | 2.2 | 56.4 | 3.6 |
| 2Fab-scFc-1scDb-4 | CD19 | ABC1197var8 | NKp46-3 | 20.1 | 5.4 | 56.2 | 1.5 |
| 1Fab-AFc-1Fab-1 | CD19 | wt Fc | NKp46-1 | 18.2 | 0.8 | 48.3 | 7.2 |
| (ComparatorA_1) | | | | | | | |
| 1Fab-AFc-1Fab-2 | CD19 | wt Fc | NKp46-3 | 16.7 | 1.8 | 46.2 | 10.3 |
| (ComparatorA_2) | | | | | | | |
| 1Fab-AFc-1Fab-5 | CD19 | Fc enhanced | NKp46-1 | 1.9 | 0.3 | 55.2 | 14.6 |
| (ComparatorA_5) | | | | | | | |
| 1Fab-AFc-1Fab-6 | CD19 | Fc enhanced | NKp46-3 | 2.2 | 0.3 | 47.6 | 15.3 |
| (ComparatorA_6) | | | | | | | |
| AIG-1scFv-6 | CD19 | wt Fc | ADI-27743 | 19.0 | 0.1 | 46.3 | 11.8 |
| (ComparatorB_2) | | | | | | | |
| IgAb_67 | CD19 | Fc enhanced | −/− | 25.7 | 5.9 | 51.9 | 9.3 |
| 2Fab-1scDb-AFc-7 | EGFR | ABC1197var8 | NKp46-1 | 2.1 | 0.3 | 81.2 | 4.9 |
| IgAb_53 | EGFR | Fc enhanced | −/− | 3.4 | 0.7 | 79.9 | 4.5 |

[0349] Anti-CD19 trispecifics of the formats IG-scDb, 2Fab-1scDb-AFc, 1Fab-scDb-AFc, AIG-2scFv, 2scDb-AFc, 2tascFv-AFc, 2Fab-scFc1scDb as well as all comparator molecules of formats 1Fab-AFc-1Fab with wt Fe or enhanced Fc domain and the AIG-1scFv molecule and the IgAb-67 antibody lyse target cells with a one to two digit picomolar potency. Efficacies are in the range of 24.1 to 70.5%, except for construct AIG-2scFv-23 which contains a CD16 domain of the 3G8 variant, which performs poorly with only 10.1% efficacy. The IgAb-67 antibody for comparison lyses cells with 25.7 μM potency and an efficacy of 51.9%.

[0350] The anti-EGFR/NKp46/CD16 construct 2Fab-1scDb-AFc-7 also exhibits potent ADCC activity (2.1 μM) with an efficacy of 81.2%. The control antibody IgAb-53 for comparison has a potency of 3.4 μM and an efficacy of 79.9% in this assay.

### Example 8: NK Cell Fratricide Assay

[0351] For calcein-release cytotoxicity assays to assess NK-NK cell lysis, half of the enriched, non-activated NK cells were washed with RPMI 1640 medium without FCS and labeled with 10 μM calcein AM (Invitrogen/Molecular Probes, cat.: C3100MP) for 30 min in RPMI 1640 medium without FCS at 37° C. After gentle washing, the labeled cells were resuspended in complete RPMI medium (RPMI 1640 medium supplemented with 10% heat-inactivated FCS, 4 mM L-glutamine, 100 U/mL penicillin G sodium, 100 μg/mL streptomycin sulfate) to a density of 5×10⁵/mL. 5×10⁴ calcein-labeled NK cells (T) were then seeded together with 5×10⁴ non-labeled NK cells (E) from the same donor at an E:T ratio of 1:1 in the presence of increasing concentrations of the indicated antibodies, preferentially in the range between 10 ng/mL and 100 μg/mL, in individual wells of a round-bottom 96-well microplate in a total volume of 200 μL/well in duplicates. Human IgG1 anti-CD38 (IgAb_51 as described in WO2020/043670 was used as a positive control). Spontaneous release, maximal release and killing of calcein-labeled NK cells (T) by non-labeled NK cells (E) in the absence of antibodies were determined in quadruplicate on each plate. For induction of maximal calcein-release Triton X-100 was added to the respective wells at a final concentration of 1%. After centrifugation for 2 min at 200×g the assay was incubated for 4 h at 37° C. in a humidified atmosphere with 5% CO₂. After an additional centrifugation for 5 min at 500×g 100 μL cell culture supernatant were harvested from each well, transferred to a black flat-bottom microplate, and the fluorescence of the released calcein was measured at 520 nm using a fluorescence plate reader (EnSight, Perkin Elmer). On the basis of the measured fluorescence counts, the specific cell lysis was calculated according to the following formula: [fluorescence (sample)−fluorescence (spontaneous)]/[fluorescence (maximum)−fluorescence (spontaneous)]×100%. Fluorescence (spontaneous) represents the fluorescent counts from calcein-labeled NK cells (T) in the absence of non-labeled NK cells (E) and antibodies and fluorescence (maximum) represents the total cell lysis induced by the addition of Triton X-100 (1% final concentration). Sigmoidal dose response curves were calculated by non-linear regression/4-parameter logistic fit using the GraphPad Prism software and plotted.

### Example 9: Assessment of NK and T Cell Activation in Cultures of PBMC in the Presence or Absence of Target Cells

[0352] For the evaluation of effector cell activation and depletion of target cells by EGFR-targeting antibody constructs, 5×10⁵ unfractionated human PBMCs were seeded in individual wells of a round-bottom 96-well microplate in the presence or absence of 1×10⁴ EGFR⁺ tumor cells, e.g. SW-982 cells, leading to an E:T ratio of 50:1. Before seeding, SW-982 cells were labeled with 0.5 μM CMFDA (Invitrogen, cat.: C7025) for 30 min at 37° C. in serum-free RPMI 1640 medium, and washed twice in serum-free medium.

[0353] For the assessment of cell activation and depletion by CD19-targeting antibody constructs 5×10⁵ unfractionated human PBMCs or B cell-depleted PBMC were used.

[0354] Cells were cultured in complete RPMI medium (RPMI 1640 medium supplemented with 10% heat-inactivated FCS, 2 mM L-glutamine, 100 U/mL penicillin G sodium, and 100 μg/mL streptomycin sulfate) in the presence of the indicated antibody concentrations, preferentially in the range between 1 ng/mL and 30 μg/mL. After 20 h-24 h incubation at 37° C. with 5% CO₂ in a humidified atmosphere, cells were harvested, washed in FACS buffer (PBS (Invitrogen, cat.: 14190-169) containing 2% heat-inactivated FCS (Invitrogen, cat.: 10270-106), and 0.1% sodium azide (Roth, Karlsruhe, Germany, cat.: A1430.0100)), and were then resuspended in FACS/hIgG buffer (FACS buffer (PBS containing 2% heat-inactivated FCS, and 0.1% sodium azide) supplemented with 1 mg/mL polyclonal human IgG (e.g. Cutaquig, Octapharma)). Cells were then stained with an T cell-specific marker, e.g. CD3-BV510 (Biolegend, cat.: 300448), CD4-PE (Biolegend 317410), or CD8-BV785 (Biolgend, cat.: 344740), B cell-specific marker, e.g. CD20-BV605 (Biolgend, cat.: 302333, NK cell-specific marker, e.g. CD56-PE-Cy7 (Biolegend, cat.: 362510), and activation and inhibitory markers, e.g. CD69-APC (Biolgend, cat.: 310910), or CD25-PE/Dazzle 594 (Biolegend, cat.: 302646), CD137-BV605 (Biolegend, cat.: 309822) or CD154-BV421 (Biolegend, cat.: 310824), OX40-PE (Biolegend, cat.: 350004), PD-1-PE (Miltenyi Biotech, cat.: 130-117-384) or TIGIT-BV421 (Biolegend, cat.: 372710), and a viability dye, e.g. Fixable Viability Dye eFluor™ 780 (Invitrogen, cat.: 65-0865-14), in FACS/hIgG buffer for 15 min on ice in the dark with antibody concentrations recommended by the supplier. After repeated washing with FACS buffer, a defined volume of each cell suspension or cell count, e.g. 1×10⁴ cells, was analyzed by flow cytometry using a CytoFlex or CytoFlex S flow cytometer (Beckman Coulter). For the assessment of antibody-induced effector cell activation the percentage of activated, e.g. CD69⁺ cells of NK cells and the percentage of activated, e.g. CD69⁺ cells of T cells were quantified for each sample. Depletion of EGFR⁺ target cells by anti-EGFR antibody constructs and CD19⁺ target cells by CD19-targeting antibodies was determined by quantification of absolute counts of viable, CMFDA-labeled EGFR⁺ target cells, e.g. SW-982, and viable CD20⁺ B cells, respectively, in a defined volume by flow cytometry, or after acquisition relative to counting beads.

### Example 10: Specific Binding of Trispecific Antibody Constructs to Tumor Antigens on Cells

[0355] The specificity of trispecific antibody constructs (e.g. CD19/CD16A/NKG2D, CD19/CD16A/NKp46, EGFR/CD16A/NKG2D, and EGFR/CD16A/NKp46) for the respective tumor cell surface antigens CD19 and EGFR was assessed by incubation of CD19⁺/EGFR⁻ tumor cell lines (e.g. Raji) and CD19⁻/EGFR⁺ tumor cell lines (e.g. SW-982) with the trispecific antibody constructs and control constructs followed by flow cytometric detection with secondary FITC-conjugated goat anti-human IgG Fc antibody. Trispecific constructs comprising anti-CD19 Fv domains specifically bound to CD19⁺/EGFR⁻ tumor cells relative to secondary antibody only, whereas there was no binding detectable to CD19⁻/EGFR⁺ tumor cells. Likewise, antibody constructs comprising anti-EGFR Fv domains exhibited specific binding to CD19⁻/EGFR⁺ tumor cells, but not to CD19⁺/EGFR⁻ tumor cells.

### Example 11: Specific Binding of Trispecifc Antibody Constructs to NK Receptors, e.g. CD16A, CD16B, CD32, CD64, NKG2D, and NKp46, on Cells

[0356] To assess binding specificity of trispecific antibody constructs (e.g. CD19/CD16A/NKG2D, CD19/CD16A/NKp46, EGFR/CD16A/NKG2D, and EGFR/CD16A/NKp46) to their cognate cell surface-bound innate cell receptors, CHO cells transduced with individual recombinant human receptors (e.g. CD16A, CD16B, CD32, CD64, NKG2D, NKp46) and non-transduced control CHO cells were incubated with the trispecific constructs and control constructs followed by flow cytometric detection by e.g. FITC-conjugated goat anti-human IgG Fc secondary antibodies. The results of the cell binding experiments using CHO cell lines expressing recombinant receptors demonstrate specific binding of constructs comprising anti-CD16A Fv domains (e.g. CD19/CD16A/NKG2D, CD19/CD16A/NKp46, EGFR/CD16A/NKG2D, and EGFR/CD16A/NKp46 in tested formats IG-scDb, 2Fab-1scDb-AFc, 2Fab-1scFv-AFc, 1Fab-1scDb-AFc, AIG-2scFv, 2tascFv-AFc and 2Fab-scFc-1scDb) to cells expressing recombinant human CD16A, but no or only background binding to cells expressing other Fcg receptors, e.g. CD16B, CD32, or CD64. Likewise, only constructs comprising anti-NKG2D Fv domains (e.g. CD19/CD16A/NKG2D, or EGFR/CD16A/NKG2D) exhibited binding signals on cells expressing recombinant human NKGD, whereas constructs comprising anti-NKp46 Fv domains displayed binding to recombinant cells expressing NKp46 (Table 4 and FIGS. 19 and 20). None of constructs showed substantial binding signals on CHO cells devoid of recombinant receptors. In contrast, constructs with active Fc domains, such as scFv-IgAb and all 2-Fab-1scFv-AFc constructs (−1, −2, −3, and −4) do not or only weakly bind CD16 but exhibit high affinity to CD64 and moderate affinity to CD32. Constructs with wt or enhanced Fc domains of the formats 1Fab-AFc-1Fab and AIG-1scFv (comparator molecules) also bind to CD64 with high affinity and moderately to CD32. These constructs exhibit CD16A binding and for the Fc enhanced molecules also high affinity CD16B binding (Table 5 and FIGS. 19 and 20).

[0357] In addition, after incubation of enriched primary human NK cells, expressing endogenous receptors, e.g. CD16A, NKG2D, or NKp46, with the trispecific constructs and control constructs, all constructs comprising anti-CD16A and/or anti-NKG2D, and/or anti-NKp46 Fv domains elicited specific binding to primary human NK cells. Moreover, constructs comprising anti-NKG2D Fv domains showed binding to the NKG2D⁺ subpopulation of enriched primary human T cells.

TABLE 4
Apparent affinities (K_{D}) determined for binding of trispecific molecules to recombinant
human receptors (e.g. CD16A (48R/158F) and CD16B (NA1) expressed on the surface of CHO
cells. The CHO cells were incubated with serial dilutions of the indicated trispecific
constructs and control constructs at 37° C., and cell surface bound antibodies were
detected by FITC-conjugated goat anti-human IgG Fc and flow cytometric analysis. Measured
median fluorescence intensity values were used to calculate apparent affinities (K_{D}) by
non-linear regression. Mean and SD of two independent experiments are depicted.

| | | | | huCD16A | | huCD16B | |
|---|---|---|---|---|---|---|---|
| | | Effector | Effector | K_{D} [nM] | | K_{D} [nM] | |
| Construct | Target | domain 1 | domain 2 | mean | SD | mean | SD |
| IG-scDb-1 | CD19 | P2C47var50 | KYK-2.0 | 1705.0 | 690.1 | n.a. | n.a. |
| IG-scDb-2 | CD19 | P2C47var50 | ADI- | 194.6 | 6.9 | 9506.0 | n.a. |
| | | | 27743 | | | | |
| IG-scDb-3 | CD19 | P2C47var50 | NKp46-1 | 1068.5 | 50.2 | n.a. | n.a. |
| 2Fab-1scDb-AFc-1 | CD19 | ABC1197var8 | KYK-2.0 | 95.8 | 15.3 | n.a. | n.a. |
| 2Fab-1scDb-AFc-3 | CD19 | ABC1197var8 | NKp46-1 | 95.0 | 12.0 | n.a. | n.a. |
| 2Fab-1scDb-AFc-4 | CD19 | ABC1197var8 | NKp46-3 | 115.3 | 20.8 | n.a. | n.a. |
| 2Fab-1scDb-AFc-7 | EGFR | ABC1197var8 | NKp46-1 | 75.5 | 9.3 | n.a. | n.a. |
| 2Fab-1scFv-AFc-3 | CD19 | wt Fc | NKp46-1 | n.a. | na | n.a. | n.a. |
| 1Fab-1scDb-AFc-1 | CD19 | ABC1197var8 | KYK-2.0 | 67.5 | 28.3 | n.a. | n.a. |
| 1Fab-1scDb-AFc-3 | CD19 | ABC1197var8 | NKp46-1 | 58.4 | 18.9 | n.a. | n.a. |
| AIG-2scFv-16 | CD19 | ABC1197var8 | KYK-2.0 | 90.8 | 65.9 | n.a. | n.a. |
| AIG-2scFv-17 | CD19 | ABC1197var8 | ADI- | 66.0 | 5.6 | n.a. | n.a. |
| | | | 27743 | | | | |
| AIG-2scFv-18 | CD19 | ABC1197var8 | NKp46-1 | 158.9 | 5.0 | n.a. | n.a. |
| AIG-2scFv-19 | CD19 | ABC1197var8 | NKp46-3 | 69.8 | 26.9 | n.a. | n.a. |
| 2scDb-AFc-3 | CD19 | ABC1197var6 | NKp46-1 | 527.8 | 62.5 | n.a. | n.a. |
| 2tascFv-AFc-2 | CD19 | ABC1197var8 | ADI- | 52.6 | 4.8 | 1166.0 | n.a. |
| | | | 27743 | | | | |
| 2Fab-scFc-1scDb-1 | CD19 | ABC1197var8 | KYK-2.0 | 617.8 | 15.1 | 1773.0 | n.a. |
| 2Fab-scFc-1scDb-2 | CD19 | ABC1197var8 | ADI- | 147.1 | 10.6 | 5083.0 | n.a. |
| | | | 27743 | | | | |
| 2Fab-scFc-1scDb-3 | CD19 | ABC1197var8 | NKp46-1 | 425.4 | 98.3 | n.a. | n.a. |
| 2Fab-scFc-1scDb-4 | CD19 | ABC1197var8 | NKp46-3 | 379.7 | 41.2 | n.a. | n.a. |
| 1Fab-AFc-1Fab_1 | CD19 | wt FC | NKp46-1 | 767.1 | 133.4 | 1283.5 | 337.3 |
| (ComparatorA_1) | | | | | | | |
| 1Fab-AFc-1Fab_2 | CD19 | wt Fc | NKp46-3 | 2231.0 | 2373.1 | n.a. | n.a. |
| (ComparatorA_2) | | | | | | | |
| 1Fab-AFc-1Fab_5 | CD19 | Fc-enhanced | NKp46-1 | 96.7 | 30.6 | 111.3 | 51.4 |
| (ComparatorA_5) | | | | | | | |
| 1Fab-AFc-1Fab_6 | CD19 | Fc-enhanced | NKp46-3 | 55.8 | 4.4 | 85.8 | 31.2 |
| (ComparatorA_6) | | | | | | | |
| AIG-1scFv_5 | CD19 | wt Fc | KYK-2.0 | 1215.0 | n.a. | n.a. | n.a. |
| (ComparatorB_1) | | | | | | | |
| AIG-1scFv_6 | CD19 | wt Fc | ADI- | 1003.0 | n.a. | n.a. | n.a. |
| (ComparatorB_2) | | | 27743 | | | | |
| scFv-IgAb-393 | CD19 | wt Fc | KYK-2.0 | n.a. | n.a. | n.a. | n.a. |
| scFv-IgAb-394 | CD19 | wt Fc | ADI- | 553.3 | 386.2 | 531.5 | n.a. |
| | | | 27743 | | | | |
| scFv-IgAb-395 | CD19 | wt Fc | NKp46-1 | n.a. | n.a. | n.a. | n.a. |
| scFv-IgAb-396 | CD19 | wt Fc | NKp46-3 | 5187.0 | n.a. | n.a. | n.a. |

TABLE 5
Apparent affinities (K_{D}) determined for binding of trispecific molecules to recombinant human receptors
CD32A, CD64, NKG2D, and NKp46 expressed on the surface of CHO cells. The CHO cells were incubated
with serial dilutions of the indicated trispecific constructs and control constructs at 37° C.,
and cell surface bound antibodies were detected by FITC-conjugated goat anti-human IgG Fc and flow cytometric
analysis. Measured median fluorescence intensity values were used to calculate apparent affinities
(K_{D}) by non-linear regression. Mean and SD of two independent experiments are depicted.

| | | | | huNKp46 | | huNKG2D | | huCD32A | | huCD64 | |
|---|---|---|---|---|---|---|---|---|---|---|---|
| | | Effector | Effector | K_{D} [nM] | | K_{D} [nM] | | K_{D} [nM] | | K_{D} [nM] | |
| Construct | Target | domain 1 | domain 2 | mean | SD | mean | SD | mean | SD | mean | SD |
| IG-scDb-1 | CD19 | P2C47var50 | KYK-2.0 | 964.3 | 1272.4 | 1.3 | 0.5 | 4094.0 | n.a. | n.a. | n.a. |
| IG-scDb-2 | CD19 | P2C47var50 | ADI- | n.a. | n.a. | 1.4 | 0.5 | n.a. | n.a. | n.a. | n.a. |
| | | | 27743 | | | | | | | | |
| IG-scDb-3 | CD19 | P2C47var50 | NKp46-1 | 4.9 | 1.6 | 2888.0 | 429.9 | n.a. | n.a. | n.a. | n.a. |
| 2Fab-1scDb-AFc-1 | CD19 | ABC1197var8 | KYK-2.0 | n.a. | n.a. | 10.4 | 11.2 | n.a. | n.a. | n.a. | n.a. |
| 2Fab-1scDb-AFc-3 | CD19 | ABC1197var8 | NKp46-1 | 11.1 | 2.8 | n.a. | n.a. | n.a. | n.a. | n.a. | n.a. |
| 2Fab-1scDb-AFc-4 | CD19 | ABC1197var8 | NKp46-3 | 64.0 | 6.4 | n.a. | n.a. | n.a. | n.a. | n.a. | n.a. |
| 2Fab-1scDb-AFc-7 | EGFR | ABC1197var8 | NKp46-1 | 11.5 | 2.4 | 4225.0 | n.a. | n.a. | n.a. | n.a. | n.a. |
| 2Fab-1scFv-AFc-3 | CD19 | wt Fc | NKp46-1 | 9.7 | 2.5 | n.a. | n.a. | 682.2 | 719.6 | 38.1 | 13.7 |
| 1Fab-1scDb-AFc-1 | CD19 | ABC1197var8 | KYK-2.0 | 911.5 | n.a. | 5.7 | 1.3 | n.a. | n.a. | n.a. | n.a. |
| 1Fab-1scDb-AFc-3 | CD19 | ABC1197var8 | NKp46-1 | 8.9 | 1.5 | n.a. | n.a. | n.a. | n.a. | 1169.0 | 1.2. |
| AIG-2scFv-16 | CD19 | ABC1197var8 | KYK-2.0 | n.a. | n.a. | 13.0 | 0.2 | n.a. | n.a. | n.a. | n.a. |
| AIG-2scFv-17 | CD19 | ABC1197var8 | ADI- | n.a. | n.a. | 13.7 | 3.1 | n.a. | n.a. | n.a. | n.a. |
| | | | 27743 | | | | | | | | |
| AIG-2scFv-18 | CD19 | ABC1197var8 | NKp46-1 | 31.0 | 7.5 | n.a. | n.a. | n.a. | n.a. | n.a. | n.a. |
| AIG-2scFv-19 | CD19 | ABC1197var8 | NKp46-3 | 63.6 | 6.7 | n.a. | n.a. | n.a. | n.a. | n.a. | n.a. |
| 2scDb-AFc-3 | CD19 | ABC1197var6 | NKp46-1 | 11.5 | 0.2 | n.a. | n.a. | n.a. | n.a. | n.a. | n.a. |
| 2tascFv-AFc-2 | CD19 | ABC1197var8 | ADI- | n.a. | n.a. | 665.8 | 170.9 | n.a. | n.a. | n.a. | n.a. |
| | | | 27743 | | | | | | | | |
| 2Fab-scFc-1scDb-1 | CD19 | ABC1197var8 | KYK-2.0 | n.a. | n.a. | 8.6 | 1.4 | n.a. | n.a. | n.a. | n.a. |
| 2Fab-scFc-1scDb-2 | CD19 | ABC1197var8 | ADI- | n.a. | 1.2. | 7.0 | 2.4 | n.a. | n.a. | n.a. | n.a. |
| | | | 27743 | | | | | | | | |
| 2Fab-scFc-1scDb-3 | CD19 | ABC1197var8 | NKp46-1 | 15.4 | 2.2 | n.a. | n.a. | n.a. | n.a. | n.a. | n.a. |
| 2Fab-scFc-1scDb-4 | CD19 | ABC1197var8 | NKp46-3 | 32.2 | 3.7 | n.a. | n.a. | n.a. | n.a. | n.a. | n.a. |
| 1Fab-AFc-1Fab-1 | CD19 | wt Fc | NKp46-1 | 19.8 | 2.6 | n.a. | n.a. | 286.2 | 118.9 | 22.7 | 8.7 |
| (ComparatorA_1) | | | | | | | | | | | |
| 1Fab-AFc-1Fab-2 | CD19 | wt Fc | NKp46-3 | 48.0 | 6.2 | n.a. | n.a. | 1147.0 | n.a. | 23.9 | 7.0 |
| (ComparatorA_2) | | | | | | | | | | | |
| 1Fab-AFc-1Fab-5 | CD19 | Fc- | NKp46-1 | 19.4 | 2.4 | n.a. | n.a. | 1054.6 | 236.8 | 15.9 | 3.4 |
| (ComparatorA_5) | | enhanced | | | | | | | | | |
| 1Fab-AFc-1Fab-6 | CD19 | Fc- | NKp46-3 | 45.8 | 2.8 | n.a. | n.a. | 1012.3 | 405.5 | 12.6 | 2.7 |
| (ComparatorA_6) | | enhanced | | | | | | | | | |
| AIG-1scFv-5 | CD19 | wt Fc | KYK-2.0 | n.a. | n.a. | 28.5 | 16.2 | 2470.0 | n.a. | 27.4 | 7.6 |
| (ComparatorB 1) | | | | | | | | | | | |
| AIG-1scFv-6 | CD19 | wt Fc | ADI- | n.a. | n.a. | 22.3 | 6.8 | 2534.0 | n.a. | 22.8 | 7.7 |
| (ComparatorB 2) | | | 27743 | | | | | | | | |
| scFv-IgAb-393 | CD19 | wt Fc | KYK-2.0 | n.a. | n.a. | 1.9 | 0.9 | 3134.0 | n.a. | 36.7 | 1.4 |
| scFv-IgAb-394 | CD19 | wt Fc | ADI- | n.a. | n.a. | 4.0 | 1.4 | 164.4 | 34.0 | 31.8 | 2.8 |
| | | | 27743 | | | | | | | | |
| scFv-IgAb-395 | CD19 | wt Fc | NKp46-1 | 5.7 | 1.9 | n.a. | n.a. | 5634.0 | 2169.4 | 42.3 | 5.8 |
| scFv-IgAb-396 | CD19 | wt Fc | NKp46-3 | 9.8 | 3.7 | n.a. | n.a. | 373.9 | 64.3 | 34.1 | 6.6 |

### Example 12: Assessment of NK Cell Fratricide Induced by Trispecific Antibody Constructs

[0358] Antibody constructs that comprise two specificities for NK cell receptors (e.g. anti-CD16A/anti-CD16A, anti-CD16A/anti-NKG2D, anti-CD16A/anti-NKp46, Fc/anti-CD16A, Fc/anti-NKG2D, or Fc/anti-NKp46), in addition to one tumor antigen specificity (e.g. CD19 or EGFR), might mediate crosslinking of NK cells, leading to activation of the individual NK cells and potential NK cell-NK cell killing (i.e. NK cell fratricide). Accordingly, to assess whether trispecific constructs (e.g. CD19/CD16A/NKG2D, CD19/CD16A/NKp46, EGFR/CD16A/NKG2D, or EGFR/CD16A/NKp46) have the potential to induce NK cell fratricide, 4 h calcein-release assays with calcein-labeled NK cells as indicator for NK cell lysis and autologous non-labeled NK cells as effector cells (i.e. both NK cell preparations from the identical donor) were performed in the presence of serial dilutions of the trispecific constructs and control constructs comprising wt Fc domains instead of anti-CD16A Fv domains.

[0359] The NK cell fratricide assays resulted in no or low (below 20%) concentration-dependent lysis of NK cell by autologous NK cells in the presence of constructs having anti-CD16A Fv domains e.g. CD19/CD16A/NKG2D, CD19/CD16A/NKp46, EGFR/CD16A/NKG2D, or EGFR/CD16A/NKp46 in 2Fab-scFc-1scDb, 2Fab-1scDb-AFc, 1Fab-1scDb-AFc, 2scDb-AFc, 2tascFv-AFc, AIG-2scFv, IG-scDb, and AIG-1scDb tested formats (Table 6, FIG. 21). In contrast, lysis of NK cell was substantially induced in the presence of control constructs including active Fc domains, e.g. CD19/Fc/NKG2D, CD19/Fc/NKp46, EGFR/Fc/NKG2D, or EGFR/Fc/NKp46. The positive control anti-CD38 IgG1 (IgAb-51) induced strong concentration-dependent NK cell lysis with efficacies of more than 50% lysis. Several constructs comprising an active Fc domain induced stronger NK cell fratricide with higher efficacy than constructs without an active Fc domain but with anti-CD16A Fv domains. CD19/Fc/NKG2D trispecific constructs, e.g. 1scDb-1scFv-AFc-21tascFv-1scFv-AFc-2 induced NK cell fratricide with more than 20% efficacy.

TABLE 6
Potency (EC₅₀) and efficacy (Eₘₐₓ) values determined for trispecific constructs determined in 4 h
calcein-release assays with calcein-labeled NK cells as target cells and autologous NK cells as
effector cells at an E:T ratio of 1:1. Mean and SD of two independent experiments are presented.

| | | Effector | Effector | EC₅₀ [pM] | | Eₘₐₓ [%] | |
|---|---|---|---|---|---|---|---|
| Construct | Target | domain 1 | domain 2 | mean | SD | mean | SD |
| 1Fab-1scDb-AFc-1 | CD19 | ABC1197var8 | KYK-2.0 | 91829.0 | n.a. | 14.2 | 5.4 |
| 1Fab-1scDb-AFc-3 | CD19 | ABC1197var8 | NKp46-1 | 13464.0 | n.a. | 14.3 | 5.1 |
| 1Fab-AFc-1Fab-1 | CD19 | wt Fc | NKp46-1 | 14797.3 | 20754.6 | 2.5 | 1.0 |
| (ComparatorA_1) | | | | | | | |
| 1Fab-AFc-1Fab-2 | CD19 | wt Fc | NKp46-3 | 370.4 | 167.5 | 2.8 | 3.2 |
| (ComparatorA_2) | | | | | | | |
| 1Fab-AFc-1Fab-5 | CD19 | Fc-enhanced Fc | NKp46-1 | 73346.8 | 102728.8 | 2.7 | 2.8 |
| (ComparatorA_5) | | | | | | | |
| 1Fab-AFc-1Fab-6 | CD19 | Fc-enhanced Fc | NKp46-3 | 211.1 | n.a. | 4.8 | 2.9 |
| (ComparatorA_6) | | | | | | | |
| 1scDb-1scFv-AFc-2 | CD19 | wt Fc | ADI-27743 | 171514 | 200359 | 36.7 | 7.0 |
| 1scDb-1scFv-AFc-3 | CD19 | wt Fc | NKp46-1 | 1679.5 | 785.6 | 9.1 | 6.0 |
| 1tascFv-1scFv-AFc-2 | CD19 | wt Fc | ADI-27743 | 34858.0 | 36686.1 | 36.1 | 0.2 |
| 2Fab-1scDb-AFc-1 | CD19 | ABC1197var8 | KYK-2.0 | n.a. | n.a. | 1.8 | 2.5 |
| 2Fab-1scDb-AFc-3 | CD19 | ABC1197var8 | NKp46-1 | n.a. | n.a. | 8.2 | 0.0 |
| 2Fab-1scDb-AFc-4 | CD19 | ABC1197var8 | NKp46-3 | 8666.5 | 430.6 | 10.3 | 1.8 |
| 2Fab-1scDb-AFc-7 | EGFR | ABC1197var8 | NKp46-1 | 141.1 | n.a. | 4.7 | 3.2 |
| 2Fab-1scFv-AFc-1 | CD19 | wt Fc | KYK-2.0 | 136.7 | n.a. | 1.5 | 2.1 |
| 2Fab-1scFv-AFc-2 | CD19 | wt Fc | ADI-27743 | n.a. | n.a. | 12.4 | 6.1 |
| 2Fab-1scFv-AFc-3 | CD19 | wt Fc | NKp46-1 | 2643.0 | n.a. | 3.3 | 4.7 |
| 2Fab-1scFv-AFc-4 | CD19 | wt Fc | NKp46-3 | 8497.0 | 10381.7 | 9.0 | 2.6 |
| 2Fab-scFc-1scDb-1 | CD19 | ABC1197var8 | KYK-2.0 | 898.8 | n.a. | 2.0 | 2.8 |
| 2Fab-scFc-1scDb-2 | CD19 | ABC1197var8 | ADI-27743 | 1079.9 | 216.5 | 6.4 | 0.1 |
| 2Fab-scFc-1scDb-3 | CD19 | ABC1197var8 | NKp46-1 | 5231.0 | n.a. | 0.6 | 0.8 |
| 2Fab-scFc-1scDb-4 | CD19 | ABC1197var8 | NKp46-3 | 1345.0 | n.a. | 1.5 | 2.1 |
| 2Fab-scFc-1scFv-1 | CD19 | wt Fc | KYK-2.0 | 318319.0 | n.a. | 5.9 | 8.4 |
| 2Fab-scFc-1scFv-2 | CD19 | wt Fc | ADI-27743 | 25498.0 | n.a. | 0.9 | 1.2 |
| 2Fab-scFc-1scFv-3 | CD19 | wt Fc | NKp46-1 | 58040.0 | n.a. | 3.3 | 4.7 |
| 2Fab-scFc-1scFv-4 | CD19 | wt Fc | NKp46-3 | 48.4 | 61.8 | 3.2 | 1.3 |
| 2scDb-AFc-3 | CD19 | ABC1197var6 | NKp46-1 | 652.0 | 526.1 | 6.1 | 1.5 |
| 2tascFv-AFc-2 | CD19 | ABC1197var8 | ADI-27743 | 64925.0 | n.a. | 4.9 | 1.6 |
| AIG-1scDb-3 | CD19 | wt Fc | KYK-2.0 | n.a. | n.a. | 19.4 | 0.5 |
| AIG-1scDb-4 | CD19 | wt Fc | ADI-27743 | 5661.5 | 2629.7 | 1.7 | 1.1 |
| AIG-1scDb-5 | CD19 | wt Fc | NKp46-1 | 322.1 | n.a. | 1.0 | 1.4 |
| AIG-1scDb-6 | CD19 | wt Fc | NKp46-3 | 172.4 | n.a. | 1.5 | 2.1 |
| AIG-1scFv-5 | CD19 | wt Fc | KYK-2.0 | n.a | n.a. | 4.2 | 2.1 |
| (ComparatorB_1) | | | | | | | |
| AIG-1scFv-6 | CD19 | wt Fc | ADI-27743 | 27003.0 | n.a. | 0.9 | 1.2 |
| (ComparatorB_2) | | | | | | | |
| AIG-2scFv-16 | CD19 | ABC1197var8 | KYK-2.0 | n.a. | n.a. | 6.5 | 1.6 |
| AIG-2scFv-18 | CD19 | ABC1197var8 | NKp46-1 | 307.9 | 109.0 | 5.5 | 1.6 |
| AIG-2scFv-19 | CD19 | ABC1197var8 | NKp46-3 | 346.7 | 103.4 | 8.8 | 1.5 |
| AIG-2scFv_20 | CD19 | 3G8 | KYK-2.0 | n.a. | n.a. | 0.0 | n.a. |
| AIG-2scFv-23 | CD19 | 3G8 | NKp46-3 | 9787.0 | n.a. | 6.2 | 8.8 |
| IG-scDb-1 | CD19 | P2C-47var50 | KYK-2.0 | n.a. | n.a. | 10.0 | 5.0 |
| IG-scDb-2 | CD19 | P2C-47var50 | ADI-27743 | 886.6 | 31.2 | 7.6 | 3.6 |
| IG-scDb-3 | CD19 | P2C-47var50 | NKp46-1 | 24782.0 | 22927.2 | 13.7 | 3.6 |
| scFv-IgAb-393 | CD19 | wt Fc | KYK-2.0 | n.a. | n.a. | 4.2 | 2.7 |
| scFv-IgAb-395 | CD19 | wt Fc | NKp46-1 | n.a. | n.a. | 0.0 | n.a. |
| scFv-IgAb-396 | CD19 | wt Fc | NKp46-3 | 6812.4 | 9443.6 | 11.1 | 2.8 |

n.a., not applicable.

### Example 13: Assessment of NK Cell Fratricide by Trispecific HER2/CD16A/NKG2D Antibody Constructs

[0360] To test whether trispecific HER2/CD16A/NKG2D antibody constructs with one anti-CD16A Fv domain, one anti-NKG2D domain, and two Fab specific for HER2, e.g. AIG-2scFv-7 (SEQ ID NOs: 431-433), AIG-2scFv-8 (SEQ ID NOs: 434-436), or AIG-2scFv-10 (SEQ ID NOs: 437-439), induce NK cell fratricide, 4 h calcein-release assays with enriched primary human NK cells as indicator for NK cell lysis and autologous NK cells as effector cells were performed in the presence of 10 serial 1:5 dilutions of the indicated antibody constructs starting at 100 μg/mL. Control antibody constructs with identical HER2-targeting domains but different effector cell recruiting domains, e.g. AIG-2scFv-14 (SEQ ID NOs: 440-442) with two Fv domains for NKG2D but without an anti-CD16A domain, or AIG-2scFv-15 (SEQ ID NOs: 443-445) with one anti-NKG2D domain and one anti-RSV domain, or AIG-1scFv-4 (SEQ ID NOs: 446-448) with only one anti-NKG2D domain, were used as controls. As a positive control for the induction of NK cell fratricide, the human anti-CD38 IgG1 (IgAb_51, SEQ ID NOs: 429 and 430) was included.

[0361] The results of the 4 h cytotoxicity assay in FIG. 16 demonstrate that the trispecific HER2/CD16A/NKG2D antibody constructs induced no or only minimal NK cell fratricide with lysis values below 10% even at the highest antibody concentration of 100 μg/mL. In contrast, the positive control anti-CD38 IgG1 induced strong concentration-dependent NK cell lysis with reached efficacies of more than 50% lysis.

### Example 14: Assessment of Lysis of CD32⁺/CD64⁺ Target Cells by NK Cells Induced by Trispecific Antibody Constructs

[0362] It was tested whether trispecific antibody constructs comprising a silenced Fc domain, and Fv domains specific for a tumor antigen, e.g. CD19 or EGFR, and NK receptors, e.g. CD16A, NKG2D, or NKp46, induced lysis of tumor antigen-negative cells that express Fcg receptors CD32 and/or CD64. In 4 h calcein-release cytotoxicity assays serial dilutions of trispecific antibody constructs comprising a silenced Fc domain, e.g. CD19/CD16A/NKG2D, CD19/CD16A/NKp46, EGFR/CD16A/NKG2D, and EGFR/CD16A/NKp46, exerted a low potential to induce lysis of CD32+/CD64+ EGFR−/CD19− THP-1 target cells by enriched primary human NK cells. However, control trispecific antibody constructs comprising wt Fc or Fc-enhanced Fc domains, e.g. CD19/Fc/NKG2D, CD19/Fc/NKp46, EGFR/Fc/NKG2D, or EGFR/Fc/NKp46, induced significant lysis of CD32+/CD64+ EGFR−/CD19− THP-1 target cells in a concentration-dependent manner. The results of the cytotoxicity assays summarized in Table 7 and the exemplary graphs presented in FIG. 22 clearly demonstrate that the anti-CD16A IgG1 (IgAb-50), used as a positive control, and Fc-containing constructs in various formats such as 1Fab-AFc-1Fab-1, 1Fab-AFc-1Fab-2, 1Fab-AFc-1Fab-5, 1Fab-AFc-1Fab-6, 1scDb-1scFv-AFc-2, 1scDb-1scFv-AFc-3, 1tascFv-1scFv-AFc-2, 2Fab-scFc-1scFv-4, AIG-1scDb-6, and scFv-IgAb-396 induced potent and efficacious lysis of CD32⁺/CD64⁺ THP-1 target cells with Eₘₐₓ values>20%. In contrast, trispecific constructs in various formats without an active Fc domain, e.g. CD19/CD16A/NKG2D AIG-2scFv-16, e.g. CD19/CD16A/NKp46 2tascFv-AFc-2, e.g. EGFR/CD16A/NKG2D Fab-1scDb-AFc-5, or EGFR/CD16A/NKp46 2Fab-1scDb-AFc-7 induced no or only minimal lysis (Eₘₐₓ<20%).

TABLE 7
Potency (EC₅₀) and efficacy (Eₘₐₓ) values determined for trispecific constructs
determined in 4 h calcein-release assays with calcein-labeled THP-1 as target
cells and enriched primary human NK cells as effector cells at an E:T ratio
of 5:1. Mean and SD of two independent experiments are presented.

| | | Effector | Effector | EC₅₀ [pM] | | Eₘₐₓ [%] | |
|---|---|---|---|---|---|---|---|
| Construct | Target | domain 1 | domain 2 | mean | SD | mean | SD |
| 1Fab-1scDb-AFc-1 | CD19 | ABC1197var8 | KYK-2.0 | n.a. | n.a. | 7.5 | 10.7 |
| 1Fab-1scDb-AFc-3 | CD19 | ABC1197var8 | NKp46-1 | n.a. | n.a. | 9.8 | 3.8 |
| 1Fab-AFc-1Fab-1 | CD19 | wt Fc | NKp46-1 | 14.6 | 5.3 | 74.1 | 1.6 |
| (ComparatorA_1) | | | | | | | |
| 1Fab-AFc-1Fab-2 | CD19 | wt Fc | NKp46-3 | 16.1 | 4.4 | 76.9 | 7.3 |
| (ComparatorA_2) | | | | | | | |
| 1Fab-AFc-1Fab-5 | CD19 | Fc-enhanced Fc | NKp46-1 | 6.4 | 3.3 | 67.6 | 8.6 |
| (ComparatorA_5) | | | | | | | |
| 1Fab-AFc-1Fab-6 | CD19 | Fc-enhanced Fc | NKp46-3 | 4.4 | 2.2 | 68.9 | 9.9 |
| (ComparatorA_6) | | | | | | | |
| 1scDb-1scFv-AFc-2 | CD19 | wt Fc | ADI-27743 | 1157.9 | 503.7 | 41.0 | 7.1 |
| 1scDb-1scFv-AFc-3 | CD19 | wt Fc | NKp46-1 | 4.3 | 0.1 | 72.3 | 2.9 |
| 1tascFv-1scFv-AFc-2 | CD19 | wt Fc | ADI-27743 | 782.6 | 409.3 | 43.2 | 3.2 |
| 2Fab-1scDb-AFc-1 | CD19 | ABC1197var8 | KYK-2.0 | n.a. | n.a. | 0.0 | n.a. |
| 2Fab-1scDb-AFc-10 | CD19 | 3G8 | ADI-27743 | n.a. | n.a. | 0.0 | n.a. |
| 2Fab-1scDb-AFc-11 | CD19 | 3G8 | NKp46-1 | n.a. | n.a. | 0.0 | n.a. |
| 2Fab-1scDb-AFc-2 | CD19 | ABC1197var8 | ADI-27743 | n.a. | n.a. | 0.0 | n.a. |
| 2Fab-1scDb-AFc-3 | CD19 | ABC1197var8 | NKp46-1 | n.a. | n.a. | 0.0 | n.a. |
| 2Fab-1scDb-AFc-4 | CD19 | ABC1197var8 | NKp46-3 | 26347.5 | 18297.8 | 10.5 | 2.1 |
| 2Fab-1scDb-AFc-5 | EGFR | ABC1197var8 | KYK-2.0 | n.a. | n.a. | 0.0 | n.a. |
| 2Fab-1scDb-AFc-6 | EGFR | ABC1197var8 | ADI-27743 | n.a. | n.a. | 0.0 | n.a. |
| 2Fab-1scDb-AFc-7 | EGFR | ABC1197var8 | NKp46-1 | n.a. | n.a. | 2.4 | 3.3 |
| 2Fab-1scDb-AFc-9 | CD19 | 3G8 | KYK-2.0 | n.a. | n.a. | 2.1 | 3.0 |
| 2Fab-1scFv-AFc-1 | CD19 | wt Fc | KYK-2.0 | n.a. | n.a. | 1.7 | 2.4 |
| 2Fab-1scFv-AFc-2 | CD19 | wt Fc | ADI-27743 | n.a. | n.a. | 0.0 | n.a. |
| 2Fab-1scFv-AFc-4 | CD19 | wt Fc | NKp46-3 | 9.4 | 0.7 | 70.4 | 4.3 |
| 2Fab-scFc-1scDb-1 | CD19 | ABC1197var8 | KYK-2.0 | n.a. | n.a. | 0.0 | n.a. |
| 2Fab-scFc-1scDb-2 | CD19 | ABC1197var8 | ADI-27743 | n.a. | n.a. | 0.0 | n.a. |
| 2Fab-scFc-1scDb-3 | CD19 | ABC1197var8 | NKp46-1 | n.a. | n.a. | 0.0 | n.a. |
| 2Fab-scFc-1scDb-4 | CD19 | ABC1197var8 | NKp46-3 | n.a. | n.a. | 0.0 | n.a. |
| 2Fab-scFc-1scFv-4 | CD19 | wt Fc | NKp46-3 | 51.1 | 28.4 | 50.3 | 2.6 |
| 2scDb-AFc-10 | CD19 | 3G8 | ADI-27743 | n.a. | n.a. | 0.0 | n.a. |
| 2scDb-AFc-11 | CD19 | 3G8 | NKp46-1 | n.a. | n.a. | 2.1 | 3.0 |
| 2scDb-AFc-2 | CD19 | ABC1197var6 | ADI-27743 | n.a. | n.a. | 0.0 | n.a. |
| 2scDb-AFc-3 | CD19 | ABC1197var6 | NKp46-1 | n.a. | n.a. | 19.0 | 0.8 |
| 2tascFv-AFc-2 | CD19 | ABC1197var8 | ADI-27743 | n.a. | n.a. | 0.0 | 0.0 |
| AIG-1scDb-6 | CD19 | wt Fc | NKp46-3 | 8.3 | 4.1 | 49.0 | 14.5 |
| AIG-2scDb-1 | CD19 | P2C-47var50 | KYK-2.0 | n.a. | n.a. | 7.2 | 10.1 |
| AIG-2scDb-2 | CD19 | P2C-47var50 | ADI-27743 | n.a. | n.a. | 8.3 | 11.7 |
| AIG-2scDb-3 | CD19 | P2C-47var50 | NKp46-1 | n.a. | n.a. | 0.0 | n.a. |
| AIG-2scDb-4 | CD19 | P2C-47var50 | NKp46-3 | n.a. | n.a. | 0.0 | n.a. |
| AIG-2scFv-16 | CD19 | ABC1197var8 | KYK-2.0 | n.a. | n.a. | 0.0 | n.a. |
| AIG-2scFv-17 | CD19 | ABC1197var8 | ADI-27743 | n.a. | n.a. | 0.0 | n.a. |
| AIG-2scFv-18 | CD19 | ABC1197var8 | NKp46-1 | n.a. | n.a. | 0.0 | n.a. |
| AIG-2scFv-19 | CD19 | ABC1197var8 | NKp46-3 | n.a. | n.a. | 0.0 | n.a. |
| AIG-2scFv-20 | CD19 | 3G8 | KYK-2.0 | n.a. | n.a. | 0.0 | n.a. |
| AIG-2scFv-23 | CD19 | 3G8 | NKp46-3 | n.a. | n.a. | 0.0 | n.a. |
| IG-scDb-1 | CD19 | P2C-47var50 | KYK-2.0 | n.a. | n.a. | 0.0 | n.a. |
| IG-scDb-2 | CD19 | P2C-47var50 | ADI-27743 | n.a. | n.a. | 0.0 | n.a. |
| IG-scDb-3 | CD19 | P2C-47var50 | NKp46-1 | n.a. | n.a. | 0.0 | n.a. |
| IG-scDb-4 | CD19 | P2C-47var50 | NKp46-3 | n.a. | n.a. | 0.0 | n.a. |
| scFv-IgAb-396 | CD19 | wt Fc | NKp46-3 | 5.1 | 0.6 | 70.2 | 9.1 |

n.a., not applicable.

### Example 15: Induction of Tumor Cell Lysis by Trispecific Antibody Constructs Using PBMC as Effector Cells in 4 h Calcein-Release Cytotoxicity Assays

[0363] To assess the ADCC activity of CD19-targeting and EGFR-targeting trispecific antibody constructs (e.g. CD19/CD16A/NKG2D, CD19/CD16A/NKp46, EGFR/CD16A/NKG2D, EGFR/CD16A/NKp46), 4 h calcein-release cytotoxicity assays were performed with calcein-labeled CD19⁺ target cells (e.g. Raji or GRANTA-519 cells) or EGFR⁺ target cells (e.g. SW-982 or A-431 cells) and human PBMC as effector cells at an E:T ratio of 50:1 in the presence of serial dilutions of trispecific antibody constructs and control constructs. In the presence of CD19-targeting trispecific antibody constructs, specific lysis of CD19⁺ Raji or GRANTA-519 cells was induced by trispecific formats IG-scDb, 2Fab-1scDb-AFc, 1Fab-1scDb-AFc, AIG-2scFv, 2scDb-AFc, 2tascFv-AFc, 2Fab-scFc-1scDb (Table 8 and FIG. 23). In contrast, no lysis of CD19⁻/EGFR⁺ A-431 cells was observed, indicating specific lysis of target antigen-positive cells by CD19-targeting trispecific antibody constructs. Analogous, EGFR-targeting trispecific antibody constructs of the format 2Fab-1scDb-AFc induced the lysis of EGFR⁺ A-431 or SW-982 cells, whereas EGFR⁻/CD19⁺ Raji or GRANTA-19 cells were spared, indicating target antigen-positive cells by EGFR-targeting trispecific antibody constructs.

[0364] These results demonstrate that the trispecific antibody constructs not only bind to their respective recruiting receptors, e.g. CD16A, NKG2D, or NKp46, and target antigens, e.g. CD19 or EGFR, but also trigger specific lysis by human PBMC of target cell expressing the corresponding target antigen.

TABLE 8
Potency (EC₅₀) and efficacy (Eₘₐₓ) values determined for trispecific onstructs in 4 h
calcein release assays where freshly isolated human PBMC were incubated with calcein labeled
CD19⁺ or EGFR⁺ tumor cells at an effector:target ratio of 50:1 in presence of
a serial dilution of the indicated antibodies. Experiments were performed in duplicates
and the resulting mean and SD values are depicted in the table (n.a. = not applicable).

| | | Effector | Effector | EC₅₀ [pM] | | Eₘₐₓ [%] | |
|---|---|---|---|---|---|---|---|
| Construct | Target | domain 1 | domain 2 | mean | SD | mean | SD |
| IG-scDb-1 | CD19 | P2C-47var50 | KYK-2.0 | 17.6 | 7.6 | 30.6 | 0.8 |
| IG-scDb-2 | CD19 | P2C-47var50 | ADI-27743 | 10.3 | 14.1 | 29.6 | 15.5 |
| IG-scDb-3 | CD19 | P2C-47var50 | NKp46-1 | 7.3 | 4.7 | 32.1 | 1.8 |
| 2Fab-1scDb-AFc-1 | CD19 | ABC1197var8 | KYK-2.0 | 18.4 | 11.1 | 28.2 | 3.2 |
| 2Fab-1scDb-AFc-3 | CD19 | ABC1197var8 | NKp46-1 | 6.7 | 0.2 | 28.3 | 0.4 |
| 2Fab-1scDb-AFc-4 | CD19 | ABC1197var8 | NKp46-3 | 4.8 | 1.2 | 29.2 | 1.7 |
| 2Fab-1scDb-AFc-7 | EGFR | ABC1197var8 | NKp46-1 | 1.5 | 0.4 | 38.3 | 14.6 |
| 1Fab-1scDb-AFc-1 | CD19 | ABC1197var8 | KYK-2.0 | 11.9 | 4.0 | 39.9 | 3.7 |
| 1Fab-1scDb-AFc-3 | CD19 | ABC1197var8 | NKp46-1 | 4.5 | 1.7 | 42.8 | 3.5 |
| AIG-2scFv-16 | CD19 | ABC1197var8 | KYK-2.0 | 19.5 | 3.4 | 18.3 | 4.4 |
| AIG-2scFv-17 | CD19 | ABC1197var8 | ADI-27743 | 3.8 | 3.6 | 15.0 | 0.0 |
| AIG-2scFv-18 | CD19 | ABC1197var8 | NKp46-1 | 5.9 | 7.5 | 19.0 | 5.4 |
| AIG-2scFv-19 | CD19 | ABC1197var8 | NKp46-3 | 6.5 | 0.5 | 15.4 | 1.4 |
| AIG-2scFv-23 | CD19 | 3G8 | NKp46-3 | n.a. | n.a. | 0.0 | 0.0 |
| 2scDb-AFc-3 | CD19 | ABC1197var6 | NKp46-1 | 14.7 | 1.0 | 57.2 | 10.3 |
| 2tascFv-AFc-2 | CD19 | ABC1197var8 | ADI-27743 | 16.5 | 0.8 | 64.8 | 31.8 |
| 2Fab-scFc-1scDb-1 | CD19 | ABC1197var8 | KYK-2.0 | 30.7 | 31.5 | 40.5 | 27.6 |
| 2Fab-scFc-1scDb-2 | CD19 | ABC1197var8 | ADI-27743 | 48.3 | 1.0 | 36.1 | 18.7 |
| 2Fab-scFc-1scDb-3 | CD19 | ABC1197var8 | NKp46-1 | 13.3 | 10.8 | 41.0 | 25.3 |
| 2Fab-scFc-1scDb-4 | CD19 | ABC1197var8 | NKp46-3 | 15.0 | 7.8 | 44.8 | 22.3 |
| IgAb-67 | CD19 | Fc-enhanced Fc | −/− | 2332.7 | 3205.0 | 43.1 | 15.1 |
| IgAb-53 | EGFR | Fc-enhanced Fc | −/− | 27.8 | 25.1 | 58.1 | 34.0 |

### Example 16: Assessment of NK and T Cell Activation Induced by Trispecific Constructs in 24 h Cultures of PBMC in the Presence and Absence of Target Cells

[0365] To demonstrate target antigen-specific activation of NK cells and T cells by CD19-targeting trispecific antibody constructs (e.g. CD19/CD16A/NKG2D and CD19/CD16A/NKp46) and control constructs, unfractionated PBMC or CD19⁺ B cell-depleted PBMC were incubated for 24 h with trispecific antibody constructs followed by flow cytometric analysis of activation markers on NK cells and T cells. In unfractionated PBMC, CD19-targeting trispecific antibody constructs of the formats IG-scDb, 2Fab-1scDb-AFc, 1Fab-1scDb-AFc, AIG-2scFv, 2scDb-AFc, 2tascFv-AFc, 2Fab-scFc-1scDb and 2Fab-scFc-1scFv induce upregulation of activation markers, e.g. CD25, CD69, or CD137 on NK cells (table 9, columns “in presence of target cells”). Moreover, CD19-targeting trispecific antibody constructs of the formats IG-scDb, 2Fab-1scDb-AFc, 1Fab-1scDb-AFc, AIG-2scFv, 2scDb-AFc, 2tascFv-AFc, 2Fab-scFc-1scDb and 2Fab-scFc-1scFv result in the upregulation of activation marker e.g. CD25, CD69 or CD137 on T cell subsets (table 10, columns “in presence of target cells”). Conversely, NK cell and T cell activation was observed to a much lesser extent for most of the constructs named above using B cell-depleted PBMC, demonstrating target antigen-specific NK cell and T cell activation by CD16A/NKG2D and CD16A/NKp46 engaging trispecific antibody constructs (tables example 16 A and B, columns “without target cells”. In contrast, CD19-targeting trispecific antibody constructs comprising active Fc domains (e.g. CD19/Fc/NKp46) induced significant NK cell and T cell activation in both PBMC and B cell-depleted PBMC (e.g. 1Fab-AFc-1Fab-1 and -2 with wt Fc and effector domains NKp46-1 and NKp46-3, respectively as well as 1Fab-AFc-1Fab-5 and -6, with Fc-enhanced Fc domains and effector domains NKp46-1 and NKp46-3; tables 9 and 10).

[0366] Similarly, incubation of PBMC with EGFR-recruiting trispecific antibody constructs of the format 2Fab-1scDb-AFc (e.g. EGFR/CD16A/NKG2D and EGFR/CD16A/NKp46) resulted in the upregulation of activation marker, CD25, CD69, or CD137 on NK cell and T cell subsets only in the presence of supplemented EGFR⁺ target cells (e.g. SW-982 or A-431) but not or to a much lesser extent in the absence of EGFR⁺ target cells (table 9). On CD8⁺ T cells, we observe a moderate upregulation of activation markers (e.g. CD25, CD69, or CD137) for the same trispecific format 2Fab-1scDb-AFc both, in presence and in absence of EGFR⁺ target cells (table 10). However, EGFR-recruiting trispecific antibody constructs comprising active Fc domains (e.g. EGFR/Fc/NKG2D and EGFR/Fc/NKp46) mediated activation of NK cells and T cells in PBMC irrespective of the presence of supplemented EGFR⁺ target cells.

[0367] Tables 9 and 10: Induction of NK cell (table 9) and CD8⁺ T cell (table 10) activation by trispecific molecules in presence or absence of target cells. For CD19-targeting trispecifics (see column “target”) or the Fc-enhanced anti-CD19 IgG1 control antibody IgAb-67, unfractionated PBMC or CD19⁺ B cell-depleted PBMC were incubated for 24 h with the indicated concentrations of antibody constructs followed by flow cytometric determination of the percentage of CD69-positive NK cells and T cells. Alternatively, PBMC tested with EGFR targeting trispecific molecules or the Fc-enhanced anti-EGFR IgG1 control antibody IgAb-53 (see column “target”) were incubated with or without supplemented EGFR⁺ CMFDA-labeled A-431 target cells.

### Example 17: Assessment of Target Cell Depletion Induced by Trispecific Constructs in 24 h Cultures of PBMC

[0368] To demonstrate depletion of CD19⁺ B cells by CD19-targeting trispecific antibody constructs (e.g. CD19/CD16A/NKG2D and CD19/CD16A/NKp46), unfractionated PBMC were incubated for 24 h with trispecific antibody constructs and control constructs followed by flow cytometric analysis of absolute viable CD20⁺ B cell counts. CD19-targeting trispecific antibody constructs (see column “target”) of the formats IG-scDb, 2Fab-1scDb-AFc, 1Fab-1scDb-AFc, AIG-2scFv, 2scDb-AFc, 2tascFv-AFc, 2Fab-scFc-1scDb and 2Fab-scFc-1scFv resulted in concentration-dependent reduction in autologous B cells (table 11). In most cases these formats induced a higher percentage of reduction of autologous B-cells than the comparator constructs of the formats 1Fab-AFc-1Fab and AIG-1scFv with wt Fe or enhanced Fe domains.

[0369] To show depletion of EGFR⁺ target cells by EGFR-targeting trispecific antibody constructs (e.g. EGFR/CD16A/NKG2D and EGFR/CD16A/NKp46) PBMC were co-cultured for 24 h with CMFDA-labelled EGFR⁺ target cells (e.g. SW-982 or A-431) in the presence of trispecific antibody construct 2Fab-1scDb-AFc-7 or control antibody IgAb-53 followed by flow cytometric analysis of absolute viable EGFR⁺ cell counts. The presence of the EGFR-targeting trispecific antibody construct resulted in a substantial reduction in EGFR⁺ target cells (up to 50.7% at 208 ng/mL).

[0370] Hence, CD19-targeting and EGFR-targeting trispecific antibody constructs result in target antigen-specific activation of NK cells and T cells but also elicit specific depletion of target cells upon 24 h co-culture with PBMC.

### Example 18: Expression and Purification of Trispecific Innate-Cell Engager Formats

[0371] Asymmetric antibody formats were generated by assembly from two separately expressed half-antibodies containing knob- (T366W) or hole- (T366S, L368A, Y407V) mutations in their Fc portions, respectively.

[0372] Expression plasmids were generated by standard molecular biology techniques. CHO codon-optimized DNA fragments were gene-synthesized by GeneArt or amplified via PCR from available expression vectors and subcloned into a modified bicistronic mammalian expression vector pcDNA5/FRT (Life Technologies) containing two CMV promoter-controlled expression cassettes and a gene mediating Puromycin resistance.

[0373] For asymmetric IgG-scFv fusion formats, tumor targeting variable heavy and light chain domain sequences with specificities for e.g. HER2, EGFR, CD19 or others, were fused at their C-terminus to sequences of CH1 and CL of effector-silent (e.g. L234F/L235E/D265A) human IgG1 containing Knob-into-Hole mutations (Knob chain->T366W, and Hole chain->T366S, L368A, Y407V), respectively. Variable heavy and light chain domain sequences of CD16-specific antibody clones, NKG2D-specific clones or NKp46-specific clones, were fused in scFv format using a (GGGGS)₆ connector to the C-terminus of CH3 of the knob- and hole mutated Fc, respectively. To mediate protein secretion, signal peptides were added to the N-terminus of both (heavy and light) antibody chains. Sequences of all constructs were confirmed by DNA sequencing (Eurofins GATC Biotech, Cologne, Germany).

[0374] Recombinant half antibodies were expressed in CHO cells as previously described (Ellwanger et al., MAbs 2019:1-20). An alternative to the stable expression is the co-expression of asymmetric antibody comprising chains using transient transfection and expression (e.g. using ExpiCHO system, Fisher Scientific, Cat. A29133).

[0375] Fc containing antibodies were purified from clarified cell culture supernatants (CCS) using Protein A affinity chromatography (MabSelect SuRe 5 mL). Protein A elution fractions containing target protein were formulated in 10 mM Na-Acetate+4.5% Sorbitol pH 5.0 and analyzed via UV-Spectroscopy, SDS-PAGE (non-reducing (nR) or reducing (R)), analytical SE-HPLC and MALS-dRI and revealed the expected sizes of monomeric half-antibodies with a minor proportion of associated dimers.

[0376] For the assembly, separately expressed Knob- and Hole-half antibodies were mixed at an equimolar concentration, titrated to pH 8.5 using 100 mM Tris-Arginine pH 9.0 and supplemented with 200× molar excess of freshly prepared reduced L-Glutathione and incubated over night at 32° C. Control samples were drawn initially after mixing (0d) and after one day (1 d) of incubation. Finally, buffer was exchanged to 10 mM Na-Acetate+4.5% Sorbitol pH 5.0 and product was analyzed by analytical SE-HPLC, MALS-dRI and revealed the expected sizes of assembled antibody with 89% purity.

[0377] Antibody preparations not showing sufficient purity were further polished via preparative size-exclusion chromatography (SEC) and analyzed using SEC/MALS-HPLC (multi-angle light scattering), SDS-PAGE and UV-Vis spectroscopy (FIG. 24).

[0378] All molecules were able to be expressed and purified or assembled and purified and obtained product purities in the range of 64.42-100% (evaluated by SE-HPLC, table 12). In SDS-PAGE, molecules showed expected apparent molecular weights under non-reducing conditions and presence of expected fragments after reduction (FIG. 25).

TABLE 12
Purities of trispecific molecules as evaluated by SE-HPLC

| | effector | effector | purity |
|---|---|---|---|
| construct | domain 1 | domain 2 | SE-HPLC [%] |
| IG-scDb-1 | CD16A(P2C47var50) | NKG2D(KYK-2.0) | 95.66 |
| IG-scDb-2 | CD16A(P2C47var50) | NKG2D(ADI-27743) | 96.01 |
| IG-scDb-3 | CD16A(P2C47var50) | NKp46(NKp46-1) | 98.03 |
| IG-scDb-4 | CD16A(P2C47var50) | NKp46(NKp46-3) | 95.98 |
| 2Fab-1scDb-AFc-1 | CD16A(ABC1197var8) | NKG2D(KYK-2.0) | 98.96 |
| 2Fab-1scDb-AFc-2 | CD16A(ABC1197var8) | NKG2D(ADI-27743) | 96.17 |
| 2Fab-1scDb-AFc-3 | CD16A(ABC1197var8) | NKp46(NKp46-1) | 97.56 |
| 2Fab-1scDb-AFc-4 | CD16A(ABC1197var8) | NKp46(NKp46-3) | 95.58 |
| 2Fab-1scDb-AFc-5 | CD16A(ABC1197var8) | NKG2D(KYK-2.0) | 96.27 |
| 2Fab-1scDb-AFc-6 | CD16A(ABC1197var8) | NKG2D(ADI-27743) | 94.36 |
| 2Fab-1scDb-AFc-7 | CD16A(ABC1197var8) | NKp46(NKp46-1) | 95.34 |
| 2Fab-1scDb-AFc-9 | CD16A(3G8) | NKG2D(KYK-2.0) | 93.72 |
| 2Fab-1scDb-AFc_10 | CD16A(3G8) | NKG2D(ADI-27743) | 96.70 |
| 2Fab-1scDb-AFc_11 | CD16A(3G8) | NKp46(NKp46-1) | 92.49 |
| 1Fab-1scDb-AFc-1 | CD16A(ABC1197var8) | NKG2D(KYK-2.0) | 96.46 |
| 1Fab-1scDb-AFc-2 | CD16A(ABC1197var8) | NKG2D(ADI-27743) | 95.87 |
| 1Fab-1scDb-AFc-3 | CD16A(ABC1197var8) | NKp46(NKp46-1) | 94.37 |
| AIG-2scFv-16 | CD16A(ABC1197var8) | NKG2D(KYK-2.0) | 98.59 |
| AIG-2scFv-17 | CD16A(ABC1197var8) | NKG2D(ADI-27743) | 95.98 |
| AIG-2scFv-18 | CD16A(ABC1197var8) | NKp46(NKp46-1) | 98.25 |
| AIG-2scFv-19 | CD16A(ABC1197var8) | NKp46(NKp46-3) | 95.67 |
| AIG-2scFv-20 | CD16A(3G8) | NKG2D(KYK-2.0) | 96.94 |
| AIG-2scFv-23 | CD16A(3G8) | NKp46(NKp46-3) | 95.35 |
| 2Fab-1scFv-AFc-1 | wt Fc | NKG2D(KYK-2.0) | 64.42 |
| 2Fab-1scFv-AFc-2 | wt Fc | NKG2D(ADI-27743) | 88.92 |
| 2Fab-1scFv-AFc-3 | wt Fc | NKp46(NKp46-1) | 97.44 |
| 2Fab-1scFv-AFc-4 | wt Fc | NKp46(NKp46-3) | 95.64 |
| AIG-1scDb-3 | wt Fc | NKG2D(KYK-2.0) | 93.80 |
| AIG-1scDb-4 | wt Fc | NKG2D(ADI-27743) | 85.24 |
| AIG-1scDb-5 | wt Fc | NKp46(NKp46-1) | 92.44 |
| AIG-1scDb-6 | wt Fc | NKp46(NKp46-3) | 92.48 |
| 1scDb-1scFv-AFc-2 | wt Fc | NKG2D(ADI-27743) | 95.50 |
| 1scDb-1scFv-AFc-3 | wt Fc | NKp46(NKp46-1) | 99.60 |
| 2scDb-AFc-2 | CD16A(ABC1197var6) | NKG2D(ADI-27743) | 95.40 |
| 2scDb-AFc-3 | CD16A(ABC1197var6) | NKp46(NKp46-1) | 99.80 |
| 2scDb-AFc-10 | CD16A(3G8) | NKG2D(ADI-27743) | 87.30 |
| 2scDb-AFc-11 | CD16A(3G8) | NKp46(NKp46-1) | 97.90 |
| 2tascFv-AFc-2 | CD16A(ABC1197var8) | NKG2D(ADI-27743) | 96.10 |
| 1tascFv-1scFv-AFc-2 | wt Fc | NKG2D(ADI-27743) | 76.20 |
| 2Fab-scFc-1scDb-1 | CD16A(ABC1197var8) | NKG2D(KYK-2.0) | 97.30 |
| 2Fab-scFc-1scDb-2 | CD16A(ABC1197var8) | NKG2D(ADI-27743) | 98.30 |
| 2Fab-scFc-1scDb-3 | CD16A(ABC1197var8) | NKp46(NKp46-1) | 97.90 |
| 2Fab-scFc-1scDb-4 | CD16A(ABC1197var8) | NKp46(NKp46-3) | 97.20 |
| 2Fab-scFc-1scFv-1 | wt Fc | NKG2D(KYK-2.0) | 98.60 |
| 2Fab-scFc-1scFv-2 | wt Fc | NKG2D(ADI-27743) | 98.20 |
| 2Fab-scFc-1scFv-3 | wt Fc | NKp46(NKp46-1) | 99.20 |
| 2Fab-scFc-1scFv-4 | wt Fc | NKp46(NKp46-3) | 99.40 |
| 1Fab-AFc-1Fab-1 | wt Fc | NKp46(NKp46-1) | 97.10 |
| (ComparatorA_1) | | | |
| 1Fab-AFc-1Fab-2 | wt Fc | NKp46(NKp46-3) | 100.00 |
| (ComparatorA_2) | | | |
| 1Fab-AFc-1Fab-5 | Fc-enhanced | NKp46(NKp46-1) | 99.40 |
| (ComparatorA_5) | | | |
| 1Fab-AFc-1Fab_6 | Fc-enhanced | NKp46(NKp46-3) | 98.50 |
| (ComparatorA_6) | | | |
| AIG-1scFv-5 | wt Fc | NKG2D(KYK-2.0) | 97.30 |
| (ComparatorB_1) | | | |
| AIG-1scFv-6 | wt Fc | NKG2D(ADI-27743) | 99.3 |
| (ComparatorB_2) | | | |
| scFv-IgAb-393 | wt Fc | NKG2D(KYK-2.0) | 98.61 |
| scFv-IgAb-394 | wt Fc | NKG2D(ADI-27743) | 97.83 |
| scFv-IgAb-395 | wt Fc | NKp46(NKp46-1) | 97.77 |
| scFv-IgAb-396 | wt Fc | NKp46(NKp46-3) | 96.82 |
| IgAb-67 | Fc-enhanced | −/− | 96.26 |

### Example 19: Monovalent Binding Interaction of Trispecific Antibodies in SPR

[0379] To assess functionality of all binding specificities of HER2/CD16A/CD89 trispecific antibody constructs, monovalent interaction kinetics to human CD16A^{158V}, human CD16A^{158F} and human CD89 were analyzed at 37° C. using a Biacore T200 instrument (GE Healthcare) equipped with a research-grade Sensor Chip CAP (Biotin CAPture Kit, GE Healthcare) pre-equilibrated in HIBS-P+ running buffer. For monovalent interaction analysis, trispecific antibody constructs were captured (FC2, FC4) on immobilized biotinylated human HTER2-mFc.silenced/Avi-tag to a density of 50-80 RU, before recombinant monomeric human CD16A^{158V}, human CD16A^{158F} or human CD89 (concentration: 0-240 nM) was injected for 180 s at a flow rate of 40 μL/min and complex was left to dissociate for 300 s at the same flow rate. After each cycle, chip surfaces were regenerated with 6 M guanidine-HCl, 0.25 M NaOH and reloaded with Biotin Capture reagent. Interaction kinetics were determined by fitting data from multi-cycle kinetics experiments to a simple 1:1 interaction model using the local data analysis option (Rmax and RI) available within Biacore T200 Evaluation Software (v3.1). Referencing was done against a flow cell without captured ligand (Fc2-Fc1, Fc4-Fc3).

[0380] To show selectivity and to assess functionality of all binding specificities of trispecific antibody constructs, monovalent binding to recombinant human CD16A and CD89 was analyzed by SPR interaction analysis at 37° C. using recombinant monomeric antigen as analyte. Binding affinity (K_{D}) of human CD16A to trispecific antibody constructs was determined to be 31.2 nM to 32.4 nM (human CD16A 158V) and 60.4 nM to 62.9 nM (human CD16A 158F) for molecules comprising only one anti-CD16A binding domain (AIG-2scFv-28, AIG-2scFv-29). The apparent affinity of human CD16A to the bispecific tetravalent control antibody scFv-IgAb-356 was 19.8 nM for CD16A 158V and 37.2 nM for human CD16A 158F. Binding affinity of human CD89 to trispecific constructs with only one anti-CD89 Fv domain (AIG-2scFv-28, AIG-2scFv-29), bispecific constructs with two anti-CD89 Fv domains (scFv-IgAb-441, scFv-IgAb_442), or bispecific constructs with only one anti-CD89 Fv domain (AIG-1scFv-6, AIG-1scFv-7) showed similar and very high, affinities with K_{D} values in the range 0.076 nM to 0.089 nM for constructs with anti-CD89 domain 14.1 and K_{D} values between 0.40 nM and 0.51 nM for constructs with anti-CD89 domain A77.

[0381] As antibodies were captured on immobilizes human HER2 prior to analysis for monovalent interaction with human CD16A or human CD89, data from this study suggesting selective binding for all three specificities. Although the objective of this study was to investigate specific interaction kinetics of all binding specificities, data let further suggest, that molecules are able to at least bind two different antigens simultaneously (HER2/CD16A; HER2/CD89).

TABLE 13
Trispecific and bispecific antibody binding to human CD16A (158V), CD16A (158F), and CD89 was measured
in SPR using a monovalent multi-cycle kinetic set-up at 37° C. Trispecific or bispecific constructs
were captured on a HER2-biotin-capture chip and recombinant CD16A (158V), CD16A (158F), and human
CD89 were used as analytes. Affinity and kinetic parameters were evaluated using 1:1 binding model
in three independent experiments; arithmetic mean ± standard deviation is reported here.

| | | | on-rate ka | | off-rate kd | | K_{D} | |
|---|---|---|---|---|---|---|---|---|
| | | | aritmethic | | aritmethic | | aritmethic | |
| | | Binding | mean | SD | mean | SD | mean | SD |
| Sample | Description | partner | (M⁻¹s⁻¹) | (M⁻¹s⁻¹) | (s⁻¹) | (s⁻¹) | (M) | (M) |
| AIG-1scFv-6 | HER2 (4D5) × | human | no binding | | | | | |
| | CD89 (14.1) | CD16A | | | | | | |
| AIG-1scFv-7 | HER2 (4D5) × | 158V | no binding | | | | | |
| | CD89 (A77) | | | | | | | |
| AIG-2scFv-28 | HER2 (4D5) × | | 7.46E+05 | 1.57E+05 | 2.40E−02 | 4.22E−03 | 3.24E−08 | 1.11E−09 |
| | CD89 (14.1) × | | | | | | | |
| | CD16A (P2C- | | | | | | | |
| | 47var50) | | | | | | | |
| AIG-2scFv-29 | HER2 (4D5) × | | 8.85E+05 | 1.51E+05 | 2.77E−02 | 5.08E−03 | 3.12E−08 | 1.07E−09 |
| | CD89 (A47) × | | | | | | | |
| | CD16A (P2C- | | | | | | | |
| | 47var50) | | | | | | | |
| scFv-IgAb-356 | HER2 (4D5) × | | 1.48E+06 | 3.61E+04 | 2.92E−02 | 2.08E−04 | 1.98E−08 | 3.46E−10 |
| | CD16A (P2C- | | | | | | | |
| | 47var50) | | | | | | | |
| scFv-IgAb-441 | HER2 (4D5) × | | no binding | | | | | |
| | CD89 (14.1) | | | | | | | |
| scFv-IgAb-442 | HER2 (4D5) × | | no binding | | | | | |
| | CD89 (A77) | | | | | | | |
| AIG-1scFv-6 | HER2 (4D5) × | human | no binding | | | | | |
| | CD89 (14.1) | CD16A | | | | | | |
| AIG-1scFv-7 | HER2 (4D5) × | 158F | no binding | | | | | |
| | CD89 (A77) | | | | | | | |
| AIG-2scFv-28 | HER2 (4D5) × | | 5.63E+05 | 6.65E+04 | 3.39E−02 | 3.23E−03 | 6.04E−08 | 2.80E−09 |
| | CD89 (14.1) × | | | | | | | |
| | CD16A (P2C- | | | | | | | |
| | 47var50) | | | | | | | |
| AIG-2scFv-29 | HER2 (4D5) × | | 6.54E+05 | 1.66E+05 | 4.05E−02 | 7.00E−03 | 6.29E−08 | 7.04E−09 |
| | CD89 (A47) × | | | | | | | |
| | CD16A (P2C- | | | | | | | |
| | 47var50) | | | | | | | |
| scFv-IgAb-356 | HER2 (4D5) × | | 9.15E+05 | 2.34E+05 | 3.41E−02 | 8.27E−03 | 3.72E−08 | 5.66E−10 |
| | CD16A (P2C- | | | | | | | |
| | 47var50) | | | | | | | |
| scFv-IgAb-441 | HER2 (4D5) × | | no binding | | | | | |
| | CD89 (14.1) | | | | | | | |
| scFv-IgAb-442 | HER2 (4D5) × | | no binding | | | | | |
| | CD89 (A77) | | | | | | | |
| AIG-1scFv-6 | HER2 (4D5) × | human | 3.49E+06 | 7.98E+05 | 2.98E−04 | 3.37E−05 | 8.94E−11 | 2.72E−11 |
| | CD89 (14.1) | FCAR/ | | | | | | |
| AIG-1scFv-7 | HER2 (4D5) × | CD89 | 6.08E+05 | 6.16E+04 | 2.42E−04 | 3.06E−05 | 4.05E−10 | 9.27E−11 |
| | CD89 (A77) | | | | | | | |
| AIG-2scFv-28 | HER2 (4D5) × | | 3.13E+06 | 4.71E+05 | 2.33E−04 | 3.13E−05 | 7.62E−11 | 2.00E−11 |
| | CD89 (14.1) × | | | | | | | |
| | CD16A (P2C- | | | | | | | |
| | 47var50) | | | | | | | |
| AIG-2scFv-29 | HER2 (4D5) × | | 4.78E+05 | 7.97E+04 | 2.34E−04 | 5.63E−05 | 5.08E−10 | 1.83E−10 |
| | CD89 (A47) × | | | | | | | |
| | CD16A (P2C- | | | | | | | |
| | 47var50) | | | | | | | |
| scFv-IgAb-356 | HER2 (4D5) × | | no binding | | | | | |
| | CD16A (P2C- | | | | | | | |
| | 47var50) | | | | | | | |
| scFv-IgAb-441 | HER2 (4D5) × | | 2.63E+06 | 4.86E+05 | 2.22E−04 | 7.51E−06 | 8.63E−11 | 1.53E−11 |
| | CD89 (14.1) | | | | | | | |
| scFv-IgAb-442 | HER2 (4D5) × | | 4.84E+05 | 6.65E+04 | 2.25E−04 | 1.94E−05 | 4.67E−10 | 2.50E−11 |
| | CD89 (A77) | | | | | | | |

### Example 20: Induction of ADCP by Trispecific Antibody Constructs

[0382] To assess the ADCP activity of HER2/CD16A/CD89 trispecific constructs relative to the activity of HER2/CD16A bispecific constructs a 4 h ADCP assay on SK-BR-3 target cells was established. PBMC were isolated from buffy coats as described in Example 3. CD14⁺ monocytes were enriched from PBMC by positive immunomagnetic bead selection using the EasySep™ Human CD14 Positive Selection KIT II (Stem Cell Technologies, cat.: 17858) with the Big Easy EasySep™ Magnet (Stem Cell Technologies, cat.: 18001) according to the manufacturer's instructions. Enriched monocytes were cultured for 5 days in complete RPMI 1640 medium (RPMI 1640 medium supplemented with 10% heat-inactivated FCS, 4 mM L-glutamine, 100 U/mL penicillin G sodium, 100 μg/mL streptomycin sulfate) supplemented with 50 ng/mL M-CSF (Thermo Fisher Scientific, cat.: PHC9501), and after medium exchange including M-CSF cultured for additional 2 days. Macrophages were harvested and aliquots of 3×10⁴ macrophages were seeded in individual wells of 96-well UpCell plates (Thermo Fisher Scientific, cat.: 174897) and cultured O/N. Target cells were labeled with 0.5 μM CellTracker™ Green CMFDA Dye (Thermo Fisher Scientific, cat.: C2925) at 37° C. for 30 min, washed, and cultured O/N. Target cells were then seeded on top of the adherent macrophages at an E:T ratio of 1:1 in the presence of serial dilutions of the indicated antibodies in duplicates. After 4 hours incubation, cells were detached from the culture plate by incubation on ice and stained with A700-labeled anti-CD11b (M1/70; BioLegend, cat.: 101222) and fixable viability dye eF780 (Thermo Fisher Scientific, cat.: 65-0865-14) for 30 min at 4° C. Phagocytosis of labeled target cells was quantified by analyzing CD11b⁺/CMFDA⁺ cells in % of viable cells and depletion of target cell was measured by quantification of CD11b⁻/CMFDA⁺ cells by flow cytometry. ADCP in absence of antibodies was assessed in duplicates. Phagocytosis and depletion of target cells in the presence of antibody constructs was normalized to samples incubated in the absence of antibodies.

[0383] The results of two independent ADCP assays (FIG. 26) demonstrate substantial stronger induction of phagocytosis and target cell depletion by trispecific HER2/CD16A/CD89 constructs AIG-2scFv-28 and AIG-1scDb-1scFv-5 when compared with the corresponding HER2/CD16A bispecific constructs AIG-1scFv-2 and AIG-1scDb-9, respectively.

### Example 21: Induction of Neutrophil-Mediated ADCC by Trispecific Antibodies

[0384] For the isolation of neutrophils buffy coat samples were diluted with a two-to-threefold volume of PBS (Invitrogen, cat.: 14190-169), layered on a cushion of Lymphoprep (Stem Cell Technologies, cat.: 07861) in SepMate™-50 (IVD) tubes (Stem Cell Technologies, cat.: 85460), and centrifuged at 800×g for 25 min at room temperature w/o brake. After centrifugation, diluted plasma, PBMC interface, and density gradient medium were discarded, and pellets containing red blood cells and polymorphonuclear cells were pooled. One volume of the pellet was mixed with 9 volumes of ammonium chloride solution (Stem Cell Technologies, cat.: 07800) and incubated for 15 min on ice. After centrifugation for 10 min at 500×g, supernatant was discarded and cell pellet was resuspended in RoboSep buffer (Stem Cell Technologies, cat.: 20104). Neutrophils were then enriched by negative selection using EasySep™ Human Neutrophil Isolation Kit (Stem Cell Technologies, cat.: 17957) according to the manufacturer's instructions and used as effector cells in 4 h calcein-release cytotoxicity assays. The indicated target cells were harvested from cultures, washed with RPMI 1640 medium without FCS, and labeled with 10 μM calcein AM (Invitrogen/Molecular Probes, cat.: C3100MP) for 30 min in RPMI 1640 medium without FCS at 37° C. After gently washing, the labeled cells were resuspended in complete RPMI 1640 medium (RPMI 1640 medium supplemented with 10% heat-inactivated FCS, 4 mM L-glutamine, 100 U/mL penicillin G sodium, 100 μg/mL streptomycin sulfate) to a density of 1×10⁵/mL. 1×10⁴ target cells were then seeded together with neutrophils at the indicated E:T ratios in the presence of 3 μg/mL of the indicated antibody constructs in individual wells of a round-bottom 96-well microplate in a total volume of 200 μL/well in duplicates. Spontaneous release, maximal release and killing of targets by effectors in the absence of antibodies were determined in quadruplicate on each plate. For induction of maximal calcein-release Triton X-100 was added to the respective wells at a final concentration of 1%. After centrifugation for 2 min at 200×g the assay was incubated for 4 h at 37° C. in a humidified atmosphere with 5% CO₂. 100 μL cell culture supernatant were harvested from each well after an additional centrifugation for 5 min at 500×g, transferred to a black flat-bottom microplate, and the fluorescence of the released calcein was measured at 520 nm using a fluorescence plate reader (Infinite M Plex, Tecan Group, Mannedorf, Switzerland). On the basis of the measured counts, the specific cell lysis was calculated according to the following formula: [fluorescence (sample)−fluorescence (spontaneous)]/[fluorescence (maximum)−fluorescence (spontaneous)]×100%. Fluorescence (spontaneous) represents the fluorescent counts from target cells in the absence of effector cells and antibodies and fluorescence (maximum) represents the total cell lysis induced by the addition of Triton X-100. Mean lysis values and SD were plotted using GraphPad Prism software.

[0385] The results of the 4 h cytotoxicity assay presented in FIG. 27 clearly demonstrate, that trispecific of HER2/CD16A/CD89 constructs with either one anti-CD16A and one anti-CD89 Fv domain (AIG-2scFv-28) or two anti-CD16A and one anti-CD89 Fv domains (AIG-1scDb-1scFv-5) induce lysis of HER2⁺ target cells by neutrophils in an E:T ratio-dependent manner, whereas the corresponding bispecific HER2/CD16A constructs with either one anti-CD16A domain (AIG-1scFv-2) or two anti-CD16A domains (AIG-1scDb-9) induced no or only minimal target cell lysis that was comparable to the activity of neutrophils alone in the absence of antibodies.

Sequence Listing

| SEQ | |
|---|---|
| ID NO | Sequence |
| 1 | VH CD16A-1: |
| | QVQLVQSGAEVKKPGASVKVSCKASGYTFTSYYMHWVRQAPGQCLEWMGAIEPTYGSTSYAQKFQGRVTMTRDTSTSTVYMELS |
| | SLRSEDTAVYYCARGSAYYYDFADYWGQGTLVTVSS |
| 2 | VH CD16A-2: |
| | EVQLVQSGAEVKKPGASVKVSCKASGYTFTNYYMQWVRQAPGQCLEWMGIINPSGGVTSYAQKFQGRVTMTRDTSTSTVYMELS |
| | SLRSEDTAVYYCARGSAYYYDFADYWGQGTLVTVSS |
| 3 | VH CD16A-3: |
| | QVQLVQSGAEVKKPGASVKVSCKASGYTFTNYYMQWVRQAPGQGLEWMGIINPSGGVTSYAQKFQGRVTMTRDTSTSTVYMELS |
| | SLRSEDTAVYYCARGSAYYYDFADYWGQGTLVTVSS |
| 4 | VH CD16A-4: |
| | QVQLVQSGAEVKKPGASVKVSCKASGYTFTNYYMQWVRQAPGQCLEWMGIINPSGGVTSYAQKFQGRVTMTRDTSTSTVYMELS |
| | SLRSEDTAVYYCARGSAYYYDFADYWGQGTLVTVSS |
| 5 | VL CD16A-1: |
| | SYELTQPLSVSVALGQTARITCGGHNIGSKNVHWYQQKPGQAPVLVIYQDNKRPSGIPERFSGSNSGNTATLTISRAQAGDEAD |
| | YYCQVWDNYNVLFGCGTKLTVL |
| 6 | VL CD16A-3: |
| | SYELTQPLSVSVALGQTARITCGGNNIGSKSVHWYQQKPGQAPVLVIYQDKKRPSGIPERFSGSNSGNTATLTISRAQAGDEAD |
| | YYCQVWDDYIVLFGGGTKLTVL |
| 7 | VL CD16A-2/-4: |
| | SYELTQPLSVSVALGQTARITCGGNNIGSKSVHWYQQKPGQAPVLVIYQDKKRPSGIPERFSGSNSGNTATLTISRAQAGDEAD |
| | YYCQVWDDYIVLFGCGTKLTVL |
| 8 | VH CD16 (3G8): |
| | QVTLKESGPGILQPSQTLSLTCSFSGFSLRTSGMGVGWIRQPSGKGLEWLAHIWWDDDKRYNPALKSRLTISKDTSSNQVFLKI |
| | ASVDTADTATYYCAQINPAWFAYWGQGTLVTVSA |
| 9 | VL CD16 (3G8): |
| | DIVLTQSPASLAVSLGQRATISCKASQSVDFDGDSFMNWYQQKPGQPPKLLIYTTSNLESGIPARFSASGSGTDFTLNIHPVEE |
| | EDTATYYCQQSNEDPYTFGGGTKLELK |
| 10 | VH EGFR-1: |
| | QVQLQESGPGLVKPSETLSLTCTVSGGSVSSGSYYWSWIRQPPGKGLEWIGYIYYSGSTNYNPSLKSRVTISVDTSKNQFSLKL |
| | SSVTAADTAVYYCARNPISIPAFDIWGQGTMVTVSS |
| 11 | VH EGFR-2: |
| | EVQLQESGPGLVKPSETLSLTCTVSGGSVSSGSYYWSWIRQPPGKGLEWIGYIYYSGSTNYNPSLKSRVTISVDTSKNQFSLKL |
| | SSVTAADTAVYYCARNPISIPAFDIWGQGTMVTVSS |
| 12 | VL EGFR-1/-2: |
| | QPVLTQPPSVSVAPGKTARITCGGNNIGSKSVHWYQQKPGQAPVLVIYYDSDRPSGIPERFSGSNSGNTATLTISRVEAGDEAD |
| | YYCQVWDTSSDHVLFGGGTKLTVL |
| 13 | VH CD19 (MOR208): |
| | EVQLVESGGGLVKPGGSLKLSCAASGYTFTSYVMHWVRQAPGKGLEWIGYINPYNDGTKYNEKFQGRVTISSDKSISTAYMELS |
| | SLRSEDTAMYYCARGTYYYGTRVFDYWGQGTLVTVSS |
| 14 | VL CD19 (MOR208): |
| | DIVMTQSPATLSLSPGERATLSCRSSKSLQNVNGNTYLYWFQQKPGQSPQLLIYRMSNLNSGVPDRFSGSGSGTEFTLTISSLE |
| | PEDFAVYYCMQHLEYPITFGAGTKLEIK |
| 15 | VH NKG2D -1: |
| | QVQLVESGGGLVKPGGSLRLSCAASGFTFSSYGMHWVRQAPGKGLEWVAFIRYDGSNKYYADSVKGRFTISRDNSKNTLYLQMN |
| | SLRAEDTAVYYCAKDRGLGDGTYFDYWGQGTTVTVSS |
| 16 | VH NKG2D -2: |
| | EVQLVESGGGLVKPGGSLRLSCAASGFTFSSYGMHWVRQAPGKGLEWVAFIRYDGSNKYYADSVKGRFTISRDNSKNTLYLQMN |
| | SLRAEDTAVYYCAKDRGLGDGTYFDYWGQGTTVTVSS |
| 17 | VL NKG2D -1/-2: |
| | QSALTQPASVSGSPGQSITISCSGSSSNIGNNAVNWYQQLPGKAPKLLIYYDDLLPSGVSDRFSGSKSGTSAFLAISGLQSEDE |
| | ADYYCAAWDDSLNGPVFGGGTKLTVL |
| 18 | VH NKG2D -3: |
| | QVQLQQWGAGLLKPSETLSLTCAVYGGSFSGYYWSWIRQPPGKGLEWIGEIDHSGSTNYNPSLKSRVTISVDTSKNQFSLKLSS |
| | VTAADTAVYYCARARGPWSFDPWGQGTLVTVSS |
| 19 | VH NKG2D -4: |
| | EVQLQQWGAGLLKPSETLSLTCAVYGGSFSGYYWSWIRQPPGKGLEWIGEIDHSGSTNYNPSLKSRVTISVDTSKNQFSLKLSS |
| | VTAADTAVYYCARARGPWSFDPWGQGTLVTVSS |
| 20 | VL NKG2D -3/-4: |
| | DIQMTQSPSTLSASVGDRVTITCRASQSISSWLAWYQQKPGKAPKLLIYKASSLESGVPSRFSGSGSGTEFTLTISSLQPDDFA |
| | TYYCQQYNSYPTFGGGTKVEIK |
| 21 | VH NKp46 -1: |
| | QVQLQQSGPELVKPGASVKMSCKASGYTFTDYVINWGKQRSGQGLEWIGEIYPGSGTNYYNEKFKAKATLTADKSSNIAYMQLS |
| | SLTSEDSAVYFCARRGRYGLYAMDYWGQGTSVTVSS |
| 22 | VH NKp46 -2: |
| | EVQLQQSGPELVKPGASVKMSCKASGYTFTDYVINWGKQRSGQGLEWIGEIYPGSGTNYYNEKFKAKATLTADKSSNIAYMQLS |
| | SLTSEDSAVYFCARRGRYGLYAMDYWGQGTSVTVSS |
| 23 | VL NKp46 -1/-2: |
| | DIQMTQTTSSLSASLGDRVTISCRASQDISNYLNWYQQKPDGTVKLLIYYTSRLHSGVPSRFSGSGSGTDYSLTINNLEQEDIA |
| | TYFCQQGNTRPWTFGGGTKLEIK |
| 24 | VH NKp46 -3: |
| | EVQLQQSGPELVKPGASVKISCKTSGYTFTEYTMHWVKQSHGKSLEWIGGISPNIGGTSYNQKFKGKATLTVDKSSSTAYMELR |
| | SLTSEDSAVYYCARRGGSFDYWGQGTTLTVSS |
| 25 | VL NKp46 -3: |
| | DIVMTQSPATLSVTPGDRVSLSCRASQSISDYLHWYQQKSHESPRLLIKYASQSISGIPSRFSGSGSGSDFTLSINSVEPEDVG |
| | VYYCQNGHSFPLTFGAGTKLELK |
| 26 | HCDR1 CD16A-1: |
| | SYYMH |
| 27 | HCDR2 CD16A-1: |
| | AIEPTYGSTSYAQKFQG |
| 28 | HCDR3 CD16A-1: |
| | GSAYYYDFADY |
| 29 | LCDR1 CD16A-1: |
| | GGHNIGSKNVH |
| 30 | LCDR2 CD16A-1: |
| | QDNKRPS |
| 31 | LCDR3 CD16A-1: |
| | QVWDNYNVL |
| 32 | HCDR1 CD16A -2/-3/-4: |
| | NYYMQ |
| 33 | HCDR2 CD16A -2/-3/-4: |
| | IINPSGGVTSYAQKFQG |
| 34 | HCDR3 CD16A -2/-3/-4: |
| | GSAYYYDFADY |
| 35 | LCDR1 CD16A -2/-3/-4: |
| | GGNNIGSKSVH |
| 36 | LCDR2 CD16A -2/-3/-4: |
| | QDKKRPS |
| 37 | LCDR3 CD16A -2/-3/-4: |
| | QVWDDYIVL |
| 38 | HCDR1 CD16 (3G8): |
| | TSGMGVG |
| 39 | HCDR2 CD16 (3G8): |
| | HIWWDDDKRYNPALKS |
| 40 | HCDR3 CD16 (3G8): |
| | INPAWFAY |
| 41 | LCDR1 CD16 (3G8): |
| | KASQSVDFDGDSFMN |
| 42 | LCDR2 CD16 (3G8): |
| | TTSNLES |
| 43 | LCDR3 CD16 (3G8): |
| | QQSNEDPYT |
| 44 | HCDR1 EGFR-1/-2: |
| | SGSYYWS |
| 45 | HCDR2 EGFR-1/-2: |
| | YIYYSGSTNYNPSLKS |
| 46 | HCDR3 EGFR-1/-2: |
| | NPISIPAFDI |
| 47 | LCDR1 EGFR-1/-2: |
| | GGNNIGSKSVH |
| 48 | LCDR2 EGFR-1/-2: |
| | YDSDRPS |
| 49 | LCDR3 EGFR-1/-2: |
| | QVWDTSSDHVL |
| 50 | HCDR1 CD19 (MOR208): |
| | SYVMH |
| 51 | HCDR2 CD19 (MOR208): |
| | YINPYNDGTKYNEKFQG |
| 52 | HCDR3 CD19 (MOR208): |
| | GTYYYGTRVFDY |
| 53 | LCDR1 CD19 (MOR208): |
| | RSSKSLQNVNGNTYLY |
| 54 | LCDR2 CD19 (MOR208): |
| | RMSNLNS |
| 55 | LCDR3 CD19 (MOR208): |
| | MQHLEYPIT |
| 56 | HCDR1 NKG2D -1/-2: |
| | SYGMH |
| 57 | HCDR2 NKG2D -1/-2: |
| | FIRYDGSNKYYADSVKG |
| 58 | HCDR3 NKG2D -1/-2: |
| | DRGLGDGTYFDY |
| 59 | LCDR1 NKG2D -1/-2: |
| | SGSSSNIGNNAVN |
| 60 | LCDR2 NKG2D -1/-2: |
| | YDDLLPS |
| 61 | LCDR3 NKG2D -1/-2: |
| | AAWDDSLNGPV |
| 62 | HCDR1 NKG2D -3/-4: |
| | GYYWS |
| 63 | HCDR2 NKG2D -3/-4: |
| | EIDHSGSTNYNPSLKS |
| 64 | HCDR3 NKG2D -3/-4: |
| | ARGPWSFDP |
| 65 | LCDR1 NKG2D -3/-4: |
| | RASQSISSWLA |
| 66 | LCDR2 NKG2D -3/-4: |
| | KASSLES |
| 67 | LCDR3 NKG2D- 3/-4: |
| | QQYNSYPT |
| 68 | HCDR1 Nkp46 -1/-2: |
| | DYVIN |
| 69 | HCDR2 Nkp46 -1/-2: |
| | EIYPGSGTNYYNEKFKA |
| 70 | HCDR3 Nkp46 -1/-2: |
| | RGRYGLYAMDY |
| 71 | LCDR1 Nkp46 -1/-2: |
| | RASQDISNYLN |
| 72 | LCDR2 Nkp46 -1/-2: |
| | YTSRLHS |
| 73 | LCDR3 Nkp46 -1/-2: |
| | QQGNTRPWT |
| 74 | HCDR1 Nkp46 -3: |
| | EYTMH |
| 75 | HCDR2 Nkp46 -3: |
| | GISPNIGGTSYNQKFKG |
| 76 | HCDR3 Nkp46 -3: |
| | RGGSFDY |
| 77 | LCDR1 Nkp46 -3: |
| | RASQSISDYLH |
| 78 | LCDR2 Nkp46 -3: |
| | YASQSIS |
| 79 | LCDR3 Nkp46 -3: |
| | QNGHSFPLT |
| 80 | Linker: |
| | GGSGGS |
| 81 | Linker: |
| | GGSGGSGGS |
| 82 | Linker: |
| | GGSGGSGGSGGSGGSGGS |
| 83 | Linker: |
| | GGSGGSGGSGGSGGSGGSGGS |
| 84 | Connector: |
| | GGGGS |
| 85 | Connector: |
| | GGGGSGGGGS |
| 86 | Connector: |
| | GGGGSGGGGSGGGGSGGGGS |
| 87 | Connector: |
| | GGGGSGGGGSGGGGSGGGGSGGGGSGGGGS |
| 88 | hinge: |
| | EPKSCDKTHTCPPCP |
| 89 | upper.hinge: |
| | EPKSCDKTHT |
| 90 | middle.hinge: |
| | DKTHTCPPCP |
| 91 | Human IgG1 CH1, CH2 and CH3 heavy chain constant domain: |
| | ASTKGPSVFPLAPSSKSTSGGTAALGCLVKDYFPEPVTVSWNSGALTSGVHTFPAVLQSSGLYSLSSVVTVPSSSLGTQTYICN |
| | VNHKPSNTKVDKKVEPKSCDKTHTCPPCPAPELLGGPSVFLFPPKPKDTLMISRTPEVTCVVVDVSHEDPEVKFNWYVDGVEVH |
| | NAKTKPREEQYNSTYRVVSVLTVLHQDWLNGKEYKCKVSNKALPAPIEKTISKAKGQPREPQVYTLPPSREEMTKNQVSLTCLV |
| | KGFYPSDIAVEWESNGQPENNYKTTPPVLDSDGSFFLYSKLTVDKSRWQQGNVFSCSVMHEALHNHYTQKSLSLSPG |
| 92 | Human IgG1 CH1, CH2 and CH3 heavy chain constant domain with silencing mutation-1: |
| | ASTKGPSVFPLAPSSKSTSGGTAALGCLVKDYFPEPVTVSWNSGALTSGVHTFPAVLQSSGLYSLSSVVTVPSSSLGTQTYICN |
| | VNHKPSNTKVDKKVEPKSCDKTHTCPPCPAPEFEGGPSVFLFPPKPKDTLMISRTPEVTCVVVAVSHEDPEVKFNWYVDGVEVH |
| | NAKTKPREEQYGSTYRVVSVLTVLHQDWLNGKEYKCKVSNKALPAPIEKTISKAKGQPREPQVYTLPPSREEMTKNQVSLTCLV |
| | KGFYPSDIAVEWESNGQPENNYKTTPPVLDSDGSFFLYSKLTVDKSRWQQGNVFSCSVMHEALHNHYTQKSLSLSPG |
| 93 | Human IgG1 CH1, CH2 and CH3 heavy chain constant domain with enhancing mutation-1: |
| | ASTKGPSVFPLAPSSKSTSGGTAALGCLVKDYFPEPVTVSWNSGALTSGVHTFPAVLQSSGLYSLSSVVTVPSSSLGTQTYICN |
| | VNHKPSNTKVDKKVEPKSCDKTHTCPPCPAPELLGGPDVFLFPPKPKDTLMISRTPEVTCVVVDVSHEDPEVKFNWYVDGVEVH |
| | NAKTKPREEQYNSTYRVVSVLTVLHQDWLNGKEYKCKVSNKALPAPEEKTISKAKGQPREPQVYTLPPSREEMTKNQVSLTCLV |
| | KGFYPSDIAVEWESNGQPENNYKTTPPVLDSDGSFFLYSKLTVDKSRWQQGNVFSCSVMHEALHNHYTQKSLSLSPG |
| 94 | Human lambda light chain constant domain: |
| | GQPKAAPSVTLFPPSSEELQANKATLVCLISDFYPGAVTVAWKADSSPVKAGVETTTPSKQSNNKYAASSYLSLTPEQWKSHRS |
| | YSCQVTHEGSTVEKTVAPTECS |
| 95 | Human Kappa light chain constant domain: |
| | RTVAAPSVFIFPPSDEQLKSGTASVVCLLNNFYPREAKVQWKVDNALQSGNSQESVTEQDSKDSTYSLSSTLTLSKADYEKHKV |
| | YACEVTHQGLSSPVTKSFNRGEC |
| 96 | CH1 heavy chain constant domain: |
| | ASTKGPSVFPLAPSSKSTSGGTAALGCLVKDYFPEPVTVSWNSGALTSGVHTFPAVLQSSGLYSLSSVVTVPSSSLGTQTYICN |
| | VNHKPSNTKVDKKV |
| 97 | CH2-CH3 heavy chain constant domain: |
| | APELLGGPSVFLFPPKPKDTLMISRTPEVTCVVVDVSHEDPEVKFNWYVDGVEVHNAKTKPREEQYNSTYRVVSVLTVLHQDWL |
| | NGKEYKCKVSNKALPAPIEKTISKAKGQPREPQVYTLPPSREEMTKNQVSLTCLVKGFYPSDIAVEWESNGQPENNYKTTPPVL |
| | DSDGSFFLYSKLTVDKSRWQQGNVFSCSVMHEALHNHYTQKSLSLSPG |
| 98 | CH2-CH3 heavy chain constant domain with silencing mutation-1: |
| | APEFEGGPSVFLFPPKPKDTLMISRTPEVTCVVVAVSHEDPEVKFNWYVDGVEVHNAKTKPREEQYGSTYRVVSVLTVLHQDWL |
| | NGKEYKCKVSNKALPAPIEKTISKAKGQPREPQVYTLPPSREEMTKNQVSLTCLVKGFYPSDIAVEWESNGQPENNYKTTPPVL |
| | DSDGSFFLYSKLTVDKSRWQQGNVFSCSVMHEALHNHYTQKSLSLSPG |
| 99 | CH2-CH3 heavy chain constant domain with enhancing mutation-1: |
| | APELLGGPDVFLFPPKPKDTLMISRTPEVTCVVVDVSHEDPEVKFNWYVDGVEVHNAKTKPREEQYNSTYRVVSVLTVLHQDWL |
| | NGKEYKCKVSNKALPAPEEKTISKAKGQPREPQVYTLPPSREEMTKNQVSLTCLVKGFYPSDIAVEWESNGQPENNYKTTPPVL |
| | DSDGSFFLYSKLTVDKSRWQQGNVFSCSVMHEALHNHYTQKSLSLSPG |
| 100 | Hole chain_CH2-CH3 heavy chain constant domain: |
| | APELLGGPSVFLFPPKPKDTLMISRTPEVTCVVVDVSHEDPEVKFNWYVDGVEVHNAKTKPREEQYNSTYRVVSVLTVLHQDWL |
| | NGKEYKCKVSNKALPAPIEKTISKAKGQPREPQVYTLPPSREEMTKNQVSLSCAVKGFYPSDIAVEWESNGQPENNYKTTPPVL |
| | DSDGSFFLVSKLTVDKSRWQQGNVFSCSVMHEALHNHYTQKSLSLSPG |
| 101 | Knob chain_CH2-CH3 heavy chain constant domain: |
| | APELLGGPSVFLFPPKPKDTLMISRTPEVTCVVVDVSHEDPEVKFNWYVDGVEVHNAKTKPREEQYNSTYRVVSVLTVLHQDWL |
| | NGKEYKCKVSNKALPAPIEKTISKAKGQPREPQVYTLPPSREEMTKNQVSLWCLVKGFYPSDIAVEWESNGQPENNYKTTPPVL |
| | DSDGSFFLYSKLTVDKSRWQQGNVFSCSVMHEALHNHYTQKSLSLSPG |
| 102 | Hole chain_CH2-CH3 heavy chain constant domain with silencing mutation-1: |
| | APEFEGGPSVFLFPPKPKDTLMISRTPEVTCVVVAVSHEDPEVKFNWYVDGVEVHNAKTKPREEQYGSTYRVVSVLTVLHQDWL |
| | NGKEYKCKVSNKALPAPIEKTISKAKGQPREPQVYTLPPSREEMTKNQVSLSCAVKGFYPSDIAVEWESNGQPENNYKTTPPVL |
| | DSDGSFFLVSKLTVDKSRWQQGNVFSCSVMHEALHNHYTQKSLSLSPG |
| 103 | Knob chain_CH2-CH3 heavy chain constant domain with silencing mutation-1: |
| | APEFEGGPSVFLFPPKPKDTLMISRTPEVTCVVVAVSHEDPEVKFNWYVDGVEVHNAKTKPREEQYGSTYRVVSVLTVLHQDWL |
| | NGKEYKCKVSNKALPAPIEKTISKAKGQPREPQVYTLPPSREEMTKNQVSLWCLVKGFYPSDIAVEWESNGQPENNYKTTPPVL |
| | DSDGSFFLYSKLTVDKSRWQQGNVFSCSVMHEALHNHYTQKSLSLSPG |
| 104 | Hole chain_CH2-CH3 heavy chain constant domain with enhancing mutation-1: |
| | APELLGGPDVFLFPPKPKDTLMISRTPEVTCVVVDVSHEDPEVKFNWYVDGVEVHNAKTKPREEQYNSTYRVVSVLTVLHQDWL |
| | NGKEYKCKVSNKALPAPEEKTISKAKGQPREPQVYTLPPSREEMTKNQVSLSCAVKGFYPSDIAVEWESNGQPENNYKTTPPVL |
| | DSDGSFFLVSKLTVDKSRWQQGNVFSCSVMHEALHNHYTQKSLSLSPG |
| 105 | Knob chain_CH2-CH3 heavy chain constant domain with enhancing mutation-1: |
| | APELLGGPDVFLFPPKPKDTLMISRTPEVTCVVVDVSHEDPEVKFNWYVDGVEVHNAKTKPREEQYNSTYRVVSVLTVLHQDWL |
| | NGKEYKCKVSNKALPAPEEKTISKAKGQPREPQVYTLPPSREEMTKNQVSLWCLVKGFYPSDIAVEWESNGQPENNYKTTPPVL |
| | DSDGSFFLYSKLTVDKSRWQQGNVFSCSVMHEALHNHYTQKSLSLSPG |
| 106 | single chain Fc: CH2-CH3 heavy chain constant domain: |
| | APELLGGPSVFLFPPKPKDTLMISRTPEVTCVVVDVSHEDPEVKFNWYVDGVEVHNAKTKPCEEQYNSTYRCVSVLTVLHQDWL |
| | NGKEYKCKVSNKALPAPIEKTISKAKGQPREPQVYTLPPSREEMTKNQVSLTCLVKGFYPSDIAVEWESNGQPENNYKTTPPVL |
| | DSDGSFFLYSKLTVDKSRWQQGNVFSCSVMHEALHNHYTQKSLSLSPGKGGGGSGGGGSGGGGSGGGGSGGGGSGGGGSDKTHT |
| | CPPCPAPELLGGPSVFLFPPKPKDTLMISRTPEVTCVVVDVSHEDPEVKFNWYVDGVEVHNAKTKPCEEQYNSTYRCVSVLTVL |
| | HQDWLNGKEYKCKVSNKALPAPIEKTISKAKGQPREPQVYTLPPSREEMTKNQVSLTCLVKGFYPSDIAVEWESNGQPENNYKT |
| | TPPVLDSDGSFFLYSKLTVDKSRWQQGNVFSCSVMHEALHNHYTQKSLSLSPGK |
| 107 | single chain Fc: CH2-CH3 heavy chain constant domain with silencing mutation-1: |
| | APEFEGGPSVFLFPPKPKDTLMISRTPEVTCVVVAVSHEDPEVKFNWYVDGVEVHNAKTKPCEEQYGSTYRCVSVLTVLHQDWL |
| | NGKEYKCKVSNKALPAPIEKTISKAKGQPREPQVYTLPPSREEMTKNQVSLTCLVKGFYPSDIAVEWESNGQPENNYKTTPPVL |
| | DSDGSFFLYSKLTVDKSRWQQGNVFSCSVMHEALHNHYTQKSLSLSPGKGGGGSGGGGSGGGGSGGGGSGGGGSGGGGSDKTHT |
| | CPPCPAPEFEGGPSVFLFPPKPKDTLMISRTPEVTCVVVAVSHEDPEVKFNWYVDGVEVHNAKTKPCEEQYGSTYRCVSVLTVL |
| | HQDWLNGKEYKCKVSNKALPAPIEKTISKAKGQPREPQVYTLPPSREEMTKNQVSLTCLVKGFYPSDIAVEWESNGQPENNYKT |
| | TPPVLDSDGSFFLYSKLTVDKSRWQQGNVFSCSVMHEALHNHYTQKSLSLSPGK |
| 108 | BisscDb-1: CD16A-2 × CD19 (MOR208) |
| | EVQLVQSGAEVKKPGASVKVSCKASGYTFTNYYMQWVRQAPGQCLEWMGIINPSGGVTSYAQKFQGRVTMTRDTSTSTVYMELS |
| | SLRSEDTAVYYCARGSAYYYDFADYWGQGTLVTVSSGGSGGSGGSDIVMTQSPATLSLSPGERATLSCRSSKSLQNVNGNTYLY |
| | WFQQKPGQSPQLLIYRMSNLNSGVPDRFSGSGSGTEFTLTISSLEPEDFAVYYCMQHLEYPITFGAGTKLEIKGGSGGSGGSGG |
| | SGGSGGSGGSEVQLVESGGGLVKPGGSLKLSCAASGYTFTSYVMHWVRQAPGKGLEWIGYINPYNDGTKYNEKFQGRVTISSDK |
| | SISTAYMELSSLRSEDTAMYYCARGTYYYGTRVFDYWGQGTLVTVSSGGSGGSGGSSYELTQPLSVSVALGQTARITCGGNNIG |
| | SKSVHWYQQKPGQAPVLVIYQDKKRPSGIPERFSGSNSGNTATLTISRAQAGDEADYYCQVWDDYIVLFGCGTKLTVL |
| 109 | BisscDb-2: CD16A-2 × EGFR-1 |
| | EVQLVQSGAEVKKPGASVKVSCKASGYTFTNYYMQWVRQAPGQCLEWMGIINPSGGVTSYAQKFQGRVTMTRDTSTSTVYMELS |
| | SLRSEDTAVYYCARGSAYYYDFADYWGQGTLVTVSSGGSGGSGGSQPVLTQPPSVSVAPGKTARITCGGNNIGSKSVHWYQQKP |
| | GQAPVLVIYYDSDRPSGIPERFSGSNSGNTATLTISRVEAGDEADYYCQVWDTSSDHVLFGGGTKLTVLGGSGGSGGSGGSGGS |
| | GGSGGSQVQLQESGPGLVKPSETLSLTCTVSGGSVSSGSYYWSWIRQPPGKGLEWIGYIYYSGSTNYNPSLKSRVTISVDTSKN |
| | QFSLKLSSVTAADTAVYYCARNPISIPAFDIWGQGTMVTVSSGGSGGSGGSSYELTQPLSVSVALGQTARITCGGNNIGSKSVH |
| | WYQQKPGQAPVLVIYQDKKRPSGIPERFSGSNSGNTATLTISRAQAGDEADYYCQVWDDYIVLFGCGTKLTVL |
| 110 | BisscDb-3: NKG2D-2 × CD19 (MOR208) |
| | EVQLVESGGGLVKPGGSLRLSCAASGFTFSSYGMHWVRQAPGKGLEWVAFIRYDGSNKYYADSVKGRFTISRDNSKNTLYLQMN |
| | SLRAEDTAVYYCAKDRGLGDGTYFDYWGQGTTVTVSSGGSGGSGGSDIVMTQSPATLSLSPGERATLSCRSSKSLQNVNGNTYL |
| | YWFQQKPGQSPQLLIYRMSNLNSGVPDRFSGSGSGTEFTLTISSLEPEDFAVYYCMQHLEYPITFGAGTKLEIKGGSGGSGGSG |
| | GSGGSGGSGGSEVQLVESGGGLVKPGGSLKLSCAASGYTFTSYVMHWVRQAPGKGLEWIGYINPYNDGTKYNEKFQGRVTISSD |
| | KSISTAYMELSSLRSEDTAMYYCARGTYYYGTRVFDYWGQGTLVTVSSGGSGGSGGSQSALTQPASVSGSPGQSITISCSGSSS |
| | NIGNNAVNWYQQLPGKAPKLLIYYDDLLPSGVSDRFSGSKSGTSAFLAISGLQSEDEADYYCAAWDDSLNGPVFGGGTKLTVL |
| 111 | BisscDb-4: NKG2D-4 × CD19 (MOR208) |
| | EVQLQQWGAGLLKPSETLSLTCAVYGGSFSGYYWSWIRQPPGKGLEWIGEIDHSGSTNYNPSLKSRVTISVDTSKNQFSLKLSS |
| | VTAADTAVYYCARARGPWSFDPWGQGTLVTVSSGGSGGSGGSDIVMTQSPATLSLSPGERATLSCRSSKSLQNVNGNTYLYWFQ |
| | QKPGQSPQLLIYRMSNLNSGVPDRFSGSGSGTEFTLTISSLEPEDFAVYYCMQHLEYPITFGAGTKLEIKGGSGGSGGSGGSGG |
| | SGGSGGSEVQLVESGGGLVKPGGSLKLSCAASGYTFTSYVMHWVRQAPGKGLEWIGYINPYNDGTKYNEKFQGRVTISSDKSIS |
| | TAYMELSSLRSEDTAMYYCARGTYYYGTRVFDYWGQGTLVTVSSGGSGGSGGSDIQMTQSPSTLSASVGDRVTITCRASQSISS |
| | WLAWYQQKPGKAPKLLIYKASSLESGVPSRFSGSGSGTEFTLTISSLQPDDFATYYCQQYNSYPTFGGGTKVEIK |
| 112 | BisscDb-5: NKp46-2 × CD19 (MOR208) |
| | EVQLQQSGPELVKPGASVKMSCKASGYTFTDYVINWGKQRSGQGLEWIGEIYPGSGTNYYNEKFKAKATLTADKSSNIAYMQLS |
| | SLTSEDSAVYFCARRGRYGLYAMDYWGQGTSVTVSSGGSGGSGGSDIVMTQSPATLSLSPGERATLSCRSSKSLQNVNGNTYLY |
| | WFQQKPGQSPQLLIYRMSNLNSGVPDRFSGSGSGTEFTLTISSLEPEDFAVYYCMQHLEYPITFGAGTKLEIKGGSGGSGGSGG |
| | SGGSGGSGGSEVQLVESGGGLVKPGGSLKLSCAASGYTFTSYVMHWVRQAPGKGLEWIGYINPYNDGTKYNEKFQGRVTISSDK |
| | SISTAYMELSSLRSEDTAMYYCARGTYYYGTRVFDYWGQGTLVTVSSGGSGGSGGSDIQMTQTTSSLSASLGDRVTISCRASQD |
| | ISNYLNWYQQKPDGTVKLLIYYTSRLHSGVPSRFSGSGSGTDYSLTINNLEQEDIATYFCQQGNTRPWTFGGGTKLEIK |
| 113 | BisscDb-6: NKp46-3 × CD19 (MOR208) |
| | EVQLQQSGPELVKPGASVKISCKTSGYTFTEYTMHWVKQSHGKSLEWIGGISPNIGGTSYNQKFKGKATLTVDKSSSTAYMELR |
| | SLTSEDSAVYYCARRGGSFDYWGQGTTLTVSSGGSGGSGGSDIVMTQSPATLSLSPGERATLSCRSSKSLQNVNGNTYLYWFQQ |
| | KPGQSPQLLIYRMSNLNSGVPDRFSGSGSGTEFTLTISSLEPEDFAVYYCMQHLEYPITFGAGTKLEIKGGSGGSGGSGGSGGS |
| | GGSGGSEVQLVESGGGLVKPGGSLKLSCAASGYTFTSYVMHWVRQAPGKGLEWIGYINPYNDGTKYNEKFQGRVTISSDKSIST |
| | AYMELSSLRSEDTAMYYCARGTYYYGTRVFDYWGQGTLVTVSSGGSGGSGGSDIVMTQSPATLSVTPGDRVSLSCRASQSISDY |
| | LHWYQQKSHESPRLLIKYASQSISGIPSRFSGSGSGSDFTLSINSVEPEDVGVYYCQNGHSFPLTFGAGTKLELK |
| 114 | BisscDb-7: NKG2D-2x EGFR-1 |
| | EVQLVESGGGLVKPGGSLRLSCAASGFTFSSYGMHWVRQAPGKGLEWVAFIRYDGSNKYYADSVKGRFTISRDNSKNTLYLQMN |
| | SLRAEDTAVYYCAKDRGLGDGTYFDYWGQGTTVTVSSGGSGGSGGSQPVLTQPPSVSVAPGKTARITCGGNNIGSKSVHWYQQK |
| | PGQAPVLVIYYDSDRPSGIPERFSGSNSGNTATLTISRVEAGDEADYYCQVWDTSSDHVLFGGGTKLTVLGGSGGSGGSGGSGG |
| | SGGSGGSQVQLQESGPGLVKPSETLSLTCTVSGGSVSSGSYYWSWIRQPPGKGLEWIGYIYYSGSTNYNPSLKSRVTISVDTSK |
| | NQFSLKLSSVTAADTAVYYCARNPISIPAFDIWGQGTMVTVSSGGSGGSGGSQSALTQPASVSGSPGQSITISCSGSSSNIGNN |
| | AVNWYQQLPGKAPKLLIYYDDLLPSGVSDRFSGSKSGTSAFLAISGLQSEDEADYYCAAWDDSLNGPVFGGGTKLTVL |
| 115 | BisscDb-8: NKG2D-4 × EGFR-1 |
| | EVQLQQWGAGLLKPSETLSLTCAVYGGSFSGYYWSWIRQPPGKGLEWIGEIDHSGSTNYNPSLKSRVTISVDTSKNQFSLKLSS |
| | VTAADTAVYYCARARGPWSFDPWGQGTLVTVSSGGSGGSGGSQPVLTQPPSVSVAPGKTARITCGGNNIGSKSVHWYQQKPGQA |
| | PVLVIYYDSDRPSGIPERFSGSNSGNTATLTISRVEAGDEADYYCQVWDTSSDHVLFGGGTKLTVLGGSGGSGGSGGSGGSGGS |
| | GGSQVQLQESGPGLVKPSETLSLTCTVSGGSVSSGSYYWSWIRQPPGKGLEWIGYIYYSGSTNYNPSLKSRVTISVDTSKNQFS |
| | LKLSSVTAADTAVYYCARNPISIPAFDIWGQGTMVTVSSGGSGGSGGSDIQMTQSPSTLSASVGDRVTITCRASQSISSWLAWY |
| | QQKPGKAPKLLIYKASSLESGVPSRFSGSGSGTEFTLTISSLQPDDFATYYCQQYNSYPTFGGGTKVEIK |
| 116 | BisscDb-9: NKp46-2 × EGFR-1 |
| | EVQLQQSGPELVKPGASVKMSCKASGYTFTDYVINWGKQRSGQGLEWIGEIYPGSGTNYYNEKFKAKATLTADKSSNIAYMQLS |
| | SLTSEDSAVYFCARRGRYGLYAMDYWGQGTSVTVSSGGSGGSGGSQPVLTQPPSVSVAPGKTARITCGGNNIGSKSVHWYQQKP |
| | GQAPVLVIYYDSDRPSGIPERFSGSNSGNTATLTISRVEAGDEADYYCQVWDTSSDHVLFGGGTKLTVLGGSGGSGGSGGSGGS |
| | GGSGGSQVQLQESGPGLVKPSETLSLTCTVSGGSVSSGSYYWSWIRQPPGKGLEWIGYIYYSGSTNYNPSLKSRVTISVDTSKN |
| | QFSLKLSSVTAADTAVYYCARNPISIPAFDIWGQGTMVTVSSGGSGGSGGSDIQMTQTTSSLSASLGDRVTISCRASQDISNYL |
| | NWYQQKPDGTVKLLIYYTSRLHSGVPSRFSGSGSGTDYSLTINNLEQEDIATYFCQQGNTRPWTFGGGTKLEIK |
| 117 | BisscDb-10: NKp46-3 × EGFR-1 |
| | EVQLQQSGPELVKPGASVKISCKTSGYTFTEYTMHWVKQSHGKSLEWIGGISPNIGGTSYNQKFKGKATLTVDKSSSTAYMELR |
| | SLTSEDSAVYYCARRGGSFDYWGQGTTLTVSSGGSGGSGGSQPVLTQPPSVSVAPGKTARITCGGNNIGSKSVHWYQQKPGQAP |
| | VLVIYYDSDRPSGIPERFSGSNSGNTATLTISRVEAGDEADYYCQVWDTSSDHVLFGGGTKLTVLGGSGGSGGSGGSGGSGGSG |
| | GSQVQLQESGPGLVKPSETLSLTCTVSGGSVSSGSYYWSWIRQPPGKGLEWIGYIYYSGSTNYNPSLKSRVTISVDTSKNQFSL |
| | KLSSVTAADTAVYYCARNPISIPAFDIWGQGTMVTVSSGGSGGSGGSDIVMTQSPATLSVTPGDRVSLSCRASQSISDYLHWYQ |
| | QKSHESPRLLIKYASQSISGIPSRFSGSGSGSDFTLSINSVEPEDVGVYYCQNGHSFPLTFGAGTKLELK |
| 118 | BisscDb-11: CD16A-4 × NKG2D -1 |
| | SYELTQPLSVSVALGQTARITCGGNNIGSKSVHWYQQKPGQAPVLVIYQDKKRPSGIPERFSGSNSGNTATLTISRAQAGDEAD |
| | YYCQVWDDYIVLFGCGTKLTVLGGSGGSQVQLVESGGGLVKPGGSLRLSCAASGFTFSSYGMHWVRQAPGKGLEWVAFIRYDGS |
| | NKYYADSVKGRFTISRDNSKNTLYLQMNSLRAEDTAVYYCAKDRGLGDGTYFDYWGQGTTVTVSSGGSGGSGGSGGSGGSGGSQ |
| | SALTQPASVSGSPGQSITISCSGSSSNIGNNAVNWYQQLPGKAPKLLIYYDDLLPSGVSDRFSGSKSGTSAFLAISGLQSEDEA |
| | DYYCAAWDDSLNGPVFGGGTKLTVLGGSGGSQVQLVQSGAEVKKPGASVKVSCKASGYTFTNYYMQWVRQAPGQCLEWMGIINP |
| | SGGVTSYAQKFQGRVTMTRDTSTSTVYMELSSLRSEDTAVYYCARGSAYYYDFADYWGQGTLVTVSS |
| 119 | BisscDb-12: CD16A-4 × NKG2D-3 |
| | SYELTQPLSVSVALGQTARITCGGNNIGSKSVHWYQQKPGQAPVLVIYQDKKRPSGIPERFSGSNSGNTATLTISRAQAGDEAD |
| | YYCQVWDDYIVLFGCGTKLTVLGGSGGSQVQLQQWGAGLLKPSETLSLTCAVYGGSFSGYYWSWIRQPPGKGLEWIGEIDHSGS |
| | TNYNPSLKSRVTISVDTSKNQFSLKLSSVTAADTAVYYCARARGPWSFDPWGQGTLVTVSSGGSGGSGGSGGSGGSGGSDIQMT |
| | QSPSTLSASVGDRVTITCRASQSISSWLAWYQQKPGKAPKLLIYKASSLESGVPSRFSGSGSGTEFTLTISSLQPDDFATYYCQ |
| | QYNSYPTFGGGTKVEIKGGSGGSQVQLVQSGAEVKKPGASVKVSCKASGYTFTNYYMQWVRQAPGQCLEWMGIINPSGGVTSYA |
| | QKFQGRVTMTRDTSTSTVYMELSSLRSEDTAVYYCARGSAYYYDFADYWGQGTLVTVSS |
| 120 | BisscDb-13: CD16A-4 × NKp46-1 |
| | SYELTQPLSVSVALGQTARITCGGNNIGSKSVHWYQQKPGQAPVLVIYQDKKRPSGIPERFSGSNSGNTATLTISRAQAGDEAD |
| | YYCQVWDDYIVLFGCGTKLTVLGGSGGSQVQLQQSGPELVKPGASVKMSCKASGYTFTDYVINWGKQRSGQGLEWIGEIYPGSG |
| | TNYYNEKFKAKATLTADKSSNIAYMQLSSLTSEDSAVYFCARRGRYGLYAMDYWGQGTSVTVSSGGSGGSGGSGGSGGSGGSDI |
| | QMTQTTSSLSASLGDRVTISCRASQDISNYLNWYQQKPDGTVKLLIYYTSRLHSGVPSRFSGSGSGTDYSLTINNLEQEDIATY |
| | FCQQGNTRPWTFGGGTKLEIKGGSGGSQVQLVQSGAEVKKPGASVKVSCKASGYTFTNYYMQWVRQAPGQCLEWMGIINPSGGV |
| | TSYAQKFQGRVTMTRDTSTSTVYMELSSLRSEDTAVYYCARGSAYYYDFADYWGQGTLVTVSS |
| 121 | BisscDb-14: CD16A-4 × NKp46-3 |
| | SYELTQPLSVSVALGQTARITCGGNNIGSKSVHWYQQKPGQAPVLVIYQDKKRPSGIPERFSGSNSGNTATLTISRAQAGDEAD |
| | YYCQVWDDYIVLFGCGTKLTVLGGSGGSEVQLQQSGPELVKPGASVKISCKTSGYTFTEYTMHWVKQSHGKSLEWIGGISPNIG |
| | GTSYNQKFKGKATLTVDKSSSTAYMELRSLTSEDSAVYYCARRGGSFDYWGQGTTLTVSSGGSGGSGGSGGSGGSGGSDIVMTQ |
| | SPATLSVTPGDRVSLSCRASQSISDYLHWYQQKSHESPRLLIKYASQSISGIPSRFSGSGSGSDFTLSINSVEPEDVGVYYCQN |
| | GHSFPLTFGAGTKLELKGGSGGSQVQLVQSGAEVKKPGASVKVSCKASGYTFTNYYMQWVRQAPGQCLEWMGIINPSGGVTSYA |
| | QKFQGRVTMTRDTSTSTVYMELSSLRSEDTAVYYCARGSAYYYDFADYWGQGTLVTVSS |
| 122 | BisscDb-15: CD16A (3G8) × CD19 (MOR208) |
| | QVTLKESGPGILQPSQTLSLTCSFSGFSLRTSGMGVGWIRQPSGKGLEWLAHIWWDDDKRYNPALKSRLTISKDTSSNQVFLKI |
| | ASVDTADTATYYCAQINPAWFAYWGQGTLVTVSAGGSGGSGGSDIVMTQSPATLSLSPGERATLSCRSSKSLQNVNGNTYLYWF |
| | QQKPGQSPQLLIYRMSNLNSGVPDRFSGSGSGTEFTLTISSLEPEDFAVYYCMQHLEYPITFGAGTKLEIKGGSGGSGGSGGSG |
| | GSGGSGGSEVQLVESGGGLVKPGGSLKLSCAASGYTFTSYVMHWVRQAPGKGLEWIGYINPYNDGTKYNEKFQGRVTISSDKSI |
| | STAYMELSSLRSEDTAMYYCARGTYYYGTRVFDYWGQGTLVTVSSGGSGGSGGSDIVLTQSPASLAVSLGQRATISCKASQSVD |
| | FDGDSFMNWYQQKPGQPPKLLIYTTSNLESGIPARFSASGSGTDFTLNIHPVEEEDTATYYCQQSNEDPYTFGGGTKLELK |
| 123 | BisscDb-16: CD16A (3G8) × EGFR-1 |
| | QVTLKESGPGILQPSQTLSLTCSFSGFSLRTSGMGVGWIRQPSGKGLEWLAHIWWDDDKRYNPALKSRLTISKDTSSNQVFLKI |
| | ASVDTADTATYYCAQINPAWFAYWGQGTLVTVSAGGSGGSGGSQPVLTQPPSVSVAPGKTARITCGGNNIGSKSVHWYQQKPGQ |
| | APVLVIYYDSDRPSGIPERFSGSNSGNTATLTISRVEAGDEADYYCQVWDTSSDHVLFGGGTKLTVLGGSGGSGGSGGSGGSGG |
| | SGGSQVQLQESGPGLVKPSETLSLTCTVSGGSVSSGSYYWSWIRQPPGKGLEWIGYIYYSGSTNYNPSLKSRVTISVDTSKNQF |
| | SLKLSSVTAADTAVYYCARNPISIPAFDIWGQGTMVTVSSGGSGGSGGSDIVLTQSPASLAVSLGQRATISCKASQSVDFDGDS |
| | FMNWYQQKPGQPPKLLIYTTSNLESGIPARFSASGSGTDFTLNIHPVEEEDTATYYCQQSNEDPYTFGGGTKLELK |
| 124 | BisscDb-17: CD16 (3G8) × NKG2D-1 |
| | DIVLTQSPASLAVSLGQRATISCKASQSVDFDGDSFMNWYQQKPGQPPKLLIYTTSNLESGIPARFSASGSGTDFTLNIHPVEE |
| | EDTATYYCQQSNEDPYTFGGGTKLELKGGSGGSQVQLVESGGGLVKPGGSLRLSCAASGFTFSSYGMHWVRQAPGKGLEWVAFI |
| | RYDGSNKYYADSVKGRFTISRDNSKNTLYLQMNSLRAEDTAVYYCAKDRGLGDGTYFDYWGQGTTVTVSSGGSGGSGGSGGSGG |
| | SGGSQSALTQPASVSGSPGQSITISCSGSSSNIGNNAVNWYQQLPGKAPKLLIYYDDLLPSGVSDRFSGSKSGTSAFLAISGLQ |
| | SEDEADYYCAAWDDSLNGPVFGGGTKLTVLGGSGGSQVTLKESGPGILQPSQTLSLTCSFSGFSLRTSGMGVGWIRQPSGKGLE |
| | WLAHIWWDDDKRYNPALKSRLTISKDTSSNQVFLKIASVDTADTATYYCAQINPAWFAYWGQGTLVTVSA |
| 125 | BisscDb-18: CD16 (3G8) × NKG2D-2 |
| | DIVLTQSPASLAVSLGQRATISCKASQSVDFDGDSFMNWYQQKPGQPPKLLIYTTSNLESGIPARFSASGSGTDFTLNIHPVEE |
| | EDTATYYCQQSNEDPYTFGGGTKLELKGGSGGSQVQLQQWGAGLLKPSETLSLTCAVYGGSFSGYYWSWIRQPPGKGLEWIGEI |
| | DHSGSTNYNPSLKSRVTISVDTSKNQFSLKLSSVTAADTAVYYCARARGPWSFDPWGQGTLVTVSSGGSGGSGGSGGSGGSGGS |
| | DIQMTQSPSTLSASVGDRVTITCRASQSISSWLAWYQQKPGKAPKLLIYKASSLESGVPSRFSGSGSGTEFTLTISSLQPDDFA |
| | TYYCQQYNSYPTFGGGTKVEIKGGSGGSQVTLKESGPGILQPSQTLSLTCSFSGFSLRTSGMGVGWIRQPSGKGLEWLAHIWWD |
| | DDKRYNPALKSRLTISKDTSSNQVFLKIASVDTADTATYYCAQINPAWFAYWGQGTLVTVSA |
| 126 | BisscDb-19: CD16 (3G8) × NKp46-1 |
| | DIVLTQSPASLAVSLGQRATISCKASQSVDFDGDSFMNWYQQKPGQPPKLLIYTTSNLESGIPARFSASGSGTDFTLNIHPVEE |
| | EDTATYYCQQSNEDPYTFGGGTKLELKGGSGGSQVQLQQSGPELVKPGASVKMSCKASGYTFTDYVINWGKQRSGQGLEWIGEI |
| | YPGSGTNYYNEKFKAKATLTADKSSNIAYMQLSSLTSEDSAVYFCARRGRYGLYAMDYWGQGTSVTVSSGGSGGSGGSGGSGGS |
| | GGSDIQMTQTTSSLSASLGDRVTISCRASQDISNYLNWYQQKPDGTVKLLIYYTSRLHSGVPSRFSGSGSGTDYSLTINNLEQE |
| | DIATYFCQQGNTRPWTFGGGTKLEIKGGSGGSQVTLKESGPGILQPSQTLSLTCSFSGFSLRTSGMGVGWIRQPSGKGLEWLAH |
| | IWWDDDKRYNPALKSRLTISKDTSSNQVFLKIASVDTADTATYYCAQINPAWFAYWGQGTLVTVSA |
| 127 | BisscDb-20: CD16 (3G8) × NKp46-2 |
| | DIVLTQSPASLAVSLGQRATISCKASQSVDFDGDSFMNWYQQKPGQPPKLLIYTTSNLESGIPARFSASGSGTDFTLNIHPVEE |
| | EDTATYYCQQSNEDPYTFGGGTKLELKGGSGGSEVQLQQSGPELVKPGASVKISCKTSGYTFTEYTMHWVKQSHGKSLEWIGGI |
| | SPNIGGTSYNQKFKGKATLTVDKSSSTAYMELRSLTSEDSAVYYCARRGGSFDYWGQGTTLTVSSGGSGGSGGSGGSGGSGGSD |
| | IVMTQSPATLSVTPGDRVSLSCRASQSISDYLHWYQQKSHESPRLLIKYASQSISGIPSRFSGSGSGSDFTLSINSVEPEDVGV |
| | YYCQNGHSFPLTFGAGTKLELKGGSGGSQVTLKESGPGILQPSQTLSLTCSFSGFSLRTSGMGVGWIRQPSGKGLEWLAHIWWD |
| | DDKRYNPALKSRLTISKDTSSNQVFLKIASVDTADTATYYCAQINPAWFAYWGQGTLVTVSA |
| 128 | BisscDb-21: CD16A-1 × NKG2D-1 |
| | SYELTQPLSVSVALGQTARITCGGHNIGSKNVHWYQQKPGQAPVLVIYQDNKRPSGIPERFSGSNSGNTATLTISRAQAGDEAD |
| | YYCQVWDNYNVLFGCGTKLTVLGGSGGSQVQLVESGGGLVKPGGSLRLSCAASGFTFSSYGMHWVRQAPGKGLEWVAFIRYDGS |
| | NKYYADSVKGRFTISRDNSKNTLYLQMNSLRAEDTAVYYCAKDRGLGDGTYFDYWGQGTTVTVSSGGSGGSGGSGGSGGSGGSQ |
| | SALTQPASVSGSPGQSITISCSGSSSNIGNNAVNWYQQLPGKAPKLLIYYDDLLPSGVSDRFSGSKSGTSAFLAISGLQSEDEA |
| | DYYCAAWDDSLNGPVFGGGTKLTVLGGSGGSQVQLVQSGAEVKKPGASVKVSCKASGYTFTSYYMHWVRQAPGQCLEWMGAIEP |
| | TYGSTSYAQKFQGRVTMTRDTSTSTVYMELSSLRSEDTAVYYCARGSAYYYDFADYWGQGTLVTVSS |
| 129 | BisscDb-22: CD16A-1 × NKG2D-3 |
| | SYELTQPLSVSVALGQTARITCGGHNIGSKNVHWYQQKPGQAPVLVIYQDNKRPSGIPERFSGSNSGNTATLTISRAQAGDEAD |
| | YYCQVWDNYNVLFGCGTKLTVLGGSGGSQVQLQQWGAGLLKPSETLSLTCAVYGGSFSGYYWSWIRQPPGKGLEWIGEIDHSGS |
| | TNYNPSLKSRVTISVDTSKNQFSLKLSSVTAADTAVYYCARARGPWSFDPWGQGTLVTVSSGGSGGSGGSGGSGGSGGSDIQMT |
| | QSPSTLSASVGDRVTITCRASQSISSWLAWYQQKPGKAPKLLIYKASSLESGVPSRFSGSGSGTEFTLTISSLQPDDFATYYCQ |
| | QYNSYPTFGGGTKVEIKGGSGGSQVQLVQSGAEVKKPGASVKVSCKASGYTFTSYYMHWVRQAPGQCLEWMGAIEPTYGSTSYA |
| | QKFQGRVTMTRDTSTSTVYMELSSLRSEDTAVYYCARGSAYYYDFADYWGQGTLVTVSS |
| 130 | BisscDb-23: CD16A-1 × NKp46-1 |
| | SYELTQPLSVSVALGQTARITCGGHNIGSKNVHWYQQKPGQAPVLVIYQDNKRPSGIPERFSGSNSGNTATLTISRAQAGDEAD |
| | YYCQVWDNYNVLFGCGTKLTVLGGSGGSQVQLQQSGPELVKPGASVKMSCKASGYTFTDYVINWGKQRSGQGLEWIGEIYPGSG |
| | TNYYNEKFKAKATLTADKSSNIAYMQLSSLTSEDSAVYFCARRGRYGLYAMDYWGQGTSVTVSSGGSGGSGGSGGSGGSGGSDI |
| | QMTQTTSSLSASLGDRVTISCRASQDISNYLNWYQQKPDGTVKLLIYYTSRLHSGVPSRFSGSGSGTDYSLTINNLEQEDIATY |
| | FCQQGNTRPWTFGGGTKLEIKGGSGGSQVQLVQSGAEVKKPGASVKVSCKASGYTFTSYYMHWVRQAPGQCLEWMGAIEPTYGS |
| | TSYAQKFQGRVTMTRDTSTSTVYMELSSLRSEDTAVYYCARGSAYYYDFADYWGQGTLVTVSS |
| 131 | BisscDb-24: CD16A-1 × NKp46-3 |
| | SYELTQPLSVSVALGQTARITCGGHNIGSKNVHWYQQKPGQAPVLVIYQDNKRPSGIPERFSGSNSGNTATLTISRAQAGDEAD |
| | YYCQVWDNYNVLFGCGTKLTVLGGSGGSEVQLQQSGPELVKPGASVKISCKTSGYTFTEYTMHWVKQSHGKSLEWIGGISPNIG |
| | GTSYNQKFKGKATLTVDKSSSTAYMELRSLTSEDSAVYYCARRGGSFDYWGQGTTLTVSSGGSGGSGGSGGSGGSGGSDIVMTQ |
| | SPATLSVTPGDRVSLSCRASQSISDYLHWYQQKSHESPRLLIKYASQSISGIPSRFSGSGSGSDFTLSINSVEPEDVGVYYCQN |
| | GHSFPLTFGAGTKLELKGGSGGSQVQLVQSGAEVKKPGASVKVSCKASGYTFTSYYMHWVRQAPGQCLEWMGAIEPTYGSTSYA |
| | QKFQGRVTMTRDTSTSTVYMELSSLRSEDTAVYYCARGSAYYYDFADYWGQGTLVTVSS |
| 132 | scDb-1: CD16A-1 |
| | SYELTQPLSVSVALGQTARITCGGHNIGSKNVHWYQQKPGQAPVLVIYQDNKRPSGIPERFSGSNSGNTATLTISRAQAGDEAD |
| | YYCQVWDNYNVLFGCGTKLTVLGGSGGSQVQLVQSGAEVKKPGASVKVSCKASGYTFTSYYMHWVRQAPGQCLEWMGAIEPTYG |
| | STSYAQKFQGRVTMTRDTSTSTVYMELSSLRSEDTAVYYCARGSAYYYDFADYWGQGTLVTVSSGGSGGSGGSGGSGGSGGSSY |
| | ELTQPLSVSVALGQTARITCGGHNIGSKNVHWYQQKPGQAPVLVIYQDNKRPSGIPERFSGSNSGNTATLTISRAQAGDEADYY |
| | CQVWDNYNVLFGCGTKLTVLGGSGGSQVQLVQSGAEVKKPGASVKVSCKASGYTFTSYYMHWVRQAPGQCLEWMGAIEPTYGST |
| | SYAQKFQGRVTMTRDTSTSTVYMELSSLRSEDTAVYYCARGSAYYYDFADYWGQGTLVTVSS |
| 133 | scDb-2: NKG2D-1 |
| | QSALTQPASVSGSPGQSITISCSGSSSNIGNNAVNWYQQLPGKAPKLLIYYDDLLPSGVSDRFSGSKSGTSAFLAISGLQSEDE |
| | ADYYCAAWDDSLNGPVFGGGTKLTVLGGSGGSQVQLVESGGGLVKPGGSLRLSCAASGFTFSSYGMHWVRQAPGKGLEWVAFIR |
| | YDGSNKYYADSVKGRFTISRDNSKNTLYLQMNSLRAEDTAVYYCAKDRGLGDGTYFDYWGQGTTVTVSSGGSGGSGGSGGSGGS |
| | GGSQSALTQPASVSGSPGQSITISCSGSSSNIGNNAVNWYQQLPGKAPKLLIYYDDLLPSGVSDRFSGSKSGTSAFLAISGLQS |
| | EDEADYYCAAWDDSLNGPVFGGGTKLTVLGGSGGSQVQLVESGGGLVKPGGSLRLSCAASGFTFSSYGMHWVRQAPGKGLEWVA |
| | FIRYDGSNKYYADSVKGRFTISRDNSKNTLYLQMNSLRAEDTAVYYCAKDRGLGDGTYFDYWGQGTTVTVSS |
| 134 | scDb-3: NKG2D-3 |
| | DIQMTQSPSTLSASVGDRVTITCRASQSISSWLAWYQQKPGKAPKLLIYKASSLESGVPSRFSGSGSGTEFTLTISSLQPDDFA |
| | TYYCQQYNSYPTFGGGTKVEIKGGSGGSQVQLQQWGAGLLKPSETLSLTCAVYGGSFSGYYWSWIRQPPGKGLEWIGEIDHSGS |
| | TNYNPSLKSRVTISVDTSKNQFSLKLSSVTAADTAVYYCARARGPWSFDPWGQGTLVTVSSGGSGGSGGSGGSGGSGGSDIQMT |
| | QSPSTLSASVGDRVTITCRASQSISSWLAWYQQKPGKAPKLLIYKASSLESGVPSRFSGSGSGTEFTLTISSLQPDDFATYYCQ |
| | QYNSYPTFGGGTKVEIKGGSGGSQVQLQQWGAGLLKPSETLSLTCAVYGGSFSGYYWSWIRQPPGKGLEWIGEIDHSGSTNYNP |
| | SLKSRVTISVDTSKNQFSLKLSSVTAADTAVYYCARARGPWSFDPWGQGTLVTVSS |
| 135 | scDb-4: NKp46-1 |
| | DIQMTQTTSSLSASLGDRVTISCRASQDISNYLNWYQQKPDGTVKLLIYYTSRLHSGVPSRFSGSGSGTDYSLTINNLEQEDIA |
| | TYFCQQGNTRPWTFGGGTKLEIKGGSGGSQVQLQQSGPELVKPGASVKMSCKASGYTFTDYVINWGKQRSGQGLEWIGEIYPGS |
| | GTNYYNEKFKAKATLTADKSSNIAYMQLSSLTSEDSAVYFCARRGRYGLYAMDYWGQGTSVTVSSGGSGGSGGSGGSGGSGGSD |
| | IQMTQTTSSLSASLGDRVTISCRASQDISNYLNWYQQKPDGTVKLLIYYTSRLHSGVPSRFSGSGSGTDYSLTINNLEQEDIAT |
| | YFCQQGNTRPWTFGGGTKLEIKGGSGGSQVQLQQSGPELVKPGASVKMSCKASGYTFTDYVINWGKQRSGQGLEWIGEIYPGSG |
| | TNYYNEKFKAKATLTADKSSNIAYMQLSSLTSEDSAVYFCARRGRYGLYAMDYWGQGTSVTVSS |
| 136 | scDb-5: NKp46-3 |
| | DIVMTQSPATLSVTPGDRVSLSCRASQSISDYLHWYQQKSHESPRLLIKYASQSISGIPSRFSGSGSGSDFTLSINSVEPEDVG |
| | VYYCQNGHSFPLTFGAGTKLELKGGSGGSEVQLQQSGPELVKPGASVKISCKTSGYTFTEYTMHWVKQSHGKSLEWIGGISPNI |
| | GGTSYNQKFKGKATLTVDKSSSTAYMELRSLTSEDSAVYYCARRGGSFDYWGQGTTLTVSSGGSGGSGGSGGSGGSGGSDIVMT |
| | QSPATLSVTPGDRVSLSCRASQSISDYLHWYQQKSHESPRLLIKYASQSISGIPSRFSGSGSGSDFTLSINSVEPEDVGVYYCQ |
| | NGHSFPLTFGAGTKLELKGGSGGSEVQLQQSGPELVKPGASVKISCKTSGYTFTEYTMHWVKQSHGKSLEWIGGISPNIGGTSY |
| | NQKFKGKATLTVDKSSSTAYMELRSLTSEDSAVYYCARRGGSFDYWGQGTTLTVSS |
| 137 | scDb-6: CD19 (MOR208) |
| | EVQLVESGGGLVKPGGSLKLSCAASGYTFTSYVMHWVRQAPGKGLEWIGYINPYNDGTKYNEKFQGRVTISSDKSISTAYMELS |
| | SLRSEDTAMYYCARGTYYYGTRVFDYWGQGTLVTVSSGGSGGSGGSDIVMTQSPATLSLSPGERATLSCRSSKSLQNVNGNTYL |
| | YWFQQKPGQSPQLLIYRMSNLNSGVPDRFSGSGSGTEFTLTISSLEPEDFAVYYCMQHLEYPITFGAGTKLEIKGGSGGSGGSG |
| | GSGGSGGSGGSEVQLVESGGGLVKPGGSLKLSCAASGYTFTSYVMHWVRQAPGKGLEWIGYINPYNDGTKYNEKFQGRVTISSD |
| | KSISTAYMELSSLRSEDTAMYYCARGTYYYGTRVFDYWGQGTLVTVSSGGSGGSGGSDIVMTQSPATLSLSPGERATLSCRSSK |
| | SLQNVNGNTYLYWFQQKPGQSPQLLIYRMSNLNSGVPDRFSGSGSGTEFTLTISSLEPEDFAVYYCMQHLEYPITFGAGTKLEI |
| | K |
| 138 | scDb-7: EGFR-2 |
| | EVQLQESGPGLVKPSETLSLTCTVSGGSVSSGSYYWSWIRQPPGKGLEWIGYIYYSGSTNYNPSLKSRVTISVDTSKNQFSLKL |
| | SSVTAADTAVYYCARNPISIPAFDIWGQGTMVTVSSGGSGGSGGSQPVLTQPPSVSVAPGKTARITCGGNNIGSKSVHWYQQKP |
| | GQAPVLVIYYDSDRPSGIPERFSGSNSGNTATLTISRVEAGDEADYYCQVWDTSSDHVLFGGGTKLTVLGGSGGSGGSGGSGGS |
| | GGSGGSQVQLQESGPGLVKPSETLSLTCTVSGGSVSSGSYYWSWIRQPPGKGLEWIGYIYYSGSTNYNPSLKSRVTISVDTSKN |
| | QFSLKLSSVTAADTAVYYCARNPISIPAFDIWGQGTMVTVSSGGSGGSGGSQPVLTQPPSVSVAPGKTARITCGGNNIGSKSVH |
| | WYQQKPGQAPVLVIYYDSDRPSGIPERFSGSNSGNTATLTISRVEAGDEADYYCQVWDTSSDHVLFGGGTKLTVL |
| 139 | ta-scFv-1: CD19 (MOR208) × CD16A-4 |
| | EVQLVESGGGLVKPGGSLKLSCAASGYTFTSYVMHWVRQAPGKGLEWIGYINPYNDGTKYNEKFQGRVTISSDKSISTAYMELS |
| | SLRSEDTAMYYCARGTYYYGTRVFDYWGQGTLVTVSSGGSGGSGGSGGSGGSGGSDIVMTQSPATLSLSPGERATLSCRSSKSL |
| | QNVNGNTYLYWFQQKPGQSPQLLIYRMSNLNSGVPDRFSGSGSGTEFTLTISSLEPEDFAVYYCMQHLEYPITFGAGTKLEIKG |
| | GGGSSYELTQPLSVSVALGQTARITCGGNNIGSKSVHWYQQKPGQAPVLVIYQDKKRPSGIPERFSGSNSGNTATLTISRAçAG |
| | DEADYYCQVWDDYIVLFGCGTKLTVLGGSGGSGGSGGSGGSGGSGGSQVQLVQSGAEVKKPGASVKVSCKASGYTFTNYYMQWV |
| | RQAPGQCLEWMGIINPSGGVTSYAQKFQGRVTMTRDTSTSTVYMELSSLRSEDTAVYYCARGSAYYYDFADYWGQGTLVTVSS |
| 140 | ta-scFv-2: CD19 (MOR208) × NKG2D-1 |
| | EVQLVESGGGLVKPGGSLKLSCAASGYTFTSYVMHWVRQAPGKGLEWIGYINPYNDGTKYNEKFQGRVTISSDKSISTAYMELS |
| | SLRSEDTAMYYCARGTYYYGTRVFDYWGQGTLVTVSSGGSGGSGGSGGSGGSGGSDIVMTQSPATLSLSPGERATLSCRSSKSL |
| | QNVNGNTYLYWFQQKPGQSPQLLIYRMSNLNSGVPDRFSGSGSGTEFTLTISSLEPEDFAVYYCMQHLEYPITFGAGTKLEIKG |
| | GGGSQSALTQPASVSGSPGQSITISCSGSSSNIGNNAVNWYQQLPGKAPKLLIYYDDLLPSGVSDRFSGSKSGTSAFLAISGLQ |
| | SEDEADYYCAAWDDSLNGPVFGGGTKLTVLGGSGGSGGSGGSGGSGGSGGSQVQLVESGGGLVKPGGSLRLSCAASGFTFSSYG |
| | MHWVRQAPGKGLEWVAFIRYDGSNKYYADSVKGRFTISRDNSKNTLYLQMNSLRAEDTAVYYCAKDRGLGDGTYFDYWGQGTTV |
| | TVSS |
| 141 | ta-scFv-3: CD19 (MOR208) × NKG2D-3 |
| | EVQLVESGGGLVKPGGSLKLSCAASGYTFTSYVMHWVRQAPGKGLEWIGYINPYNDGTKYNEKFQGRVTISSDKSISTAYMELS |
| | SLRSEDTAMYYCARGTYYYGTRVFDYWGQGTLVTVSSGGSGGSGGSGGSGGSGGSDIVMTQSPATLSLSPGERATLSCRSSKSL |
| | QNVNGNTYLYWFQQKPGQSPQLLIYRMSNLNSGVPDRFSGSGSGTEFTLTISSLEPEDFAVYYCMQHLEYPITFGAGTKLEIKG |
| | GGGSDIQMTQSPSTLSASVGDRVTITCRASQSISSWLAWYQQKPGKAPKLLIYKASSLESGVPSRFSGSGSGTEFTLTISSLQP |
| | DDFATYYCQQYNSYPTFGGGTKVEIKGGSGGSGGSGGSGGSGGSGGSQVQLQQWGAGLLKPSETLSLTCAVYGGSFSGYYWSWI |
| | RQPPGKGLEWIGEIDHSGSTNYNPSLKSRVTISVDTSKNQFSLKLSSVTAADTAVYYCARARGPWSFDPWGQGTLVTVSS |
| 142 | ta-scFv-4: CD19 (MOR208) × NKp46-1 |
| | EVQLVESGGGLVKPGGSLKLSCAASGYTFTSYVMHWVRQAPGKGLEWIGYINPYNDGTKYNEKFQGRVTISSDKSISTAYMELS |
| | SLRSEDTAMYYCARGTYYYGTRVFDYWGQGTLVTVSSGGSGGSGGSGGSGGSGGSDIVMTQSPATLSLSPGERATLSCRSSKSL |
| | QNVNGNTYLYWFQQKPGQSPQLLIYRMSNLNSGVPDRFSGSGSGTEFTLTISSLEPEDFAVYYCMQHLEYPITFGAGTKLEIKG |
| | GGGSDIQMTQTTSSLSASLGDRVTISCRASQDISNYLNWYQQKPDGTVKLLIYYTSRLHSGVPSRFSGSGSGTDYSLTINNLEQ |
| | EDIATYFCQQGNTRPWTFGGGTKLEIKGGSGGSGGSGGSGGSGGSGGSQVQLQQSGPELVKPGASVKMSCKASGYTFTDYVINW |
| | GKQRSGQGLEWIGEIYPGSGTNYYNEKFKAKATLTADKSSNIAYMQLSSLTSEDSAVYFCARRGRYGLYAMDYWGQGTSVTVSS |
| 143 | ta-scFv-5: CD19 (MOR208) × NKp46-3 |
| | EVQLVESGGGLVKPGGSLKLSCAASGYTFTSYVMHWVRQAPGKGLEWIGYINPYNDGTKYNEKFQGRVTISSDKSISTAYMELS |
| | SLRSEDTAMYYCARGTYYYGTRVFDYWGQGTLVTVSSGGSGGSGGSGGSGGSGGSDIVMTQSPATLSLSPGERATLSCRSSKSL |
| | QNVNGNTYLYWFQQKPGQSPQLLIYRMSNLNSGVPDRFSGSGSGTEFTLTISSLEPEDFAVYYCMQHLEYPITFGAGTKLEIKG |
| | GGGSDIVMTQSPATLSVTPGDRVSLSCRASQSISDYLHWYQQKSHESPRLLIKYASQSISGIPSRFSGSGSGSDFTLSINSVEP |
| | EDVGVYYCQNGHSFPLTFGAGTKLELKGGSGGSGGSGGSGGSGGSGGSEVQLQQSGPELVKPGASVKISCKTSGYTFTEYTMHW |
| | VKQSHGKSLEWIGGISPNIGGTSYNQKFKGKATLTVDKSSSTAYMELRSLTSEDSAVYYCARRGGSFDYWGQGTTLTVSS |
| 144 | ta-scFv-6: EGFR-2 × CD16A-4 |
| | EVQLQESGPGLVKPSETLSLTCTVSGGSVSSGSYYWSWIRQPPGKGLEWIGYIYYSGSTNYNPSLKSRVTISVDTSKNQFSLKL |
| | SSVTAADTAVYYCARNPISIPAFDIWGQGTMVTVSSGGSGGSGGSGGSGGSGGSQPVLTQPPSVSVAPGKTARITCGGNNIGSK |
| | SVHWYQQKPGQAPVLVIYYDSDRPSGIPERFSGSNSGNTATLTISRVEAGDEADYYCQVWDTSSDHVLFGGGTKLTVLGGGGSS |
| | YELTQPLSVSVALGQTARITCGGNNIGSKSVHWYQQKPGQAPVLVIYQDKKRPSGIPERFSGSNSGNTATLTISRAQAGDEADY |
| | YCQVWDDYIVLFGCGTKLTVLGGSGGSGGSGGSGGSGGSGGSQVQLVQSGAEVKKPGASVKVSCKASGYTFTNYYMQWVRQAPG |
| | QCLEWMGIINPSGGVTSYAQKFQGRVTMTRDTSTSTVYMELSSLRSEDTAVYYCARGSAYYYDFADYWGQGTLVTVSS |
| 145 | ta-scFv-7: EGFR-2 × NKG2D-1 |
| | EVQLQESGPGLVKPSETLSLTCTVSGGSVSSGSYYWSWIRQPPGKGLEWIGYIYYSGSTNYNPSLKSRVTISVDTSKNQFSLKL |
| | SSVTAADTAVYYCARNPISIPAFDIWGQGTMVTVSSGGSGGSGGSGGSGGSGGSQPVLTQPPSVSVAPGKTARITCGGNNIGSK |
| | SVHWYQQKPGQAPVLVIYYDSDRPSGIPERFSGSNSGNTATLTISRVEAGDEADYYCQVWDTSSDHVLFGGGTKLTVLGGGGSQ |
| | SALTQPASVSGSPGQSITISCSGSSSNIGNNAVNWYQQLPGKAPKLLIYYDDLLPSGVSDRFSGSKSGTSAFLAISGLQSEDEA |
| | DYYCAAWDDSLNGPVFGGGTKLTVLGGSGGSGGSGGSGGSGGSGGSQVQLVESGGGLVKPGGSLRLSCAASGFTFSSYGMHWVR |
| | QAPGKGLEWVAFIRYDGSNKYYADSVKGRFTISRDNSKNTLYLQMNSLRAEDTAVYYCAKDRGLGDGTYFDYWGQGTTVTVSS |
| 146 | ta-scFv-8: EGFR-2 × NKG2D-3 |
| | EVQLQESGPGLVKPSETLSLTCTVSGGSVSSGSYYWSWIRQPPGKGLEWIGYIYYSGSTNYNPSLKSRVTISVDTSKNQFSLKL |
| | SSVTAADTAVYYCARNPISIPAFDIWGQGTMVTVSSGGSGGSGGSGGSGGSGGSQPVLTQPPSVSVAPGKTARITCGGNNIGSK |
| | SVHWYQQKPGQAPVLVIYYDSDRPSGIPERFSGSNSGNTATLTISRVEAGDEADYYCQVWDTSSDHVLFGGGTKLTVLGGGGSD |
| | IQMTQSPSTLSASVGDRVTITCRASQSISSWLAWYQQKPGKAPKLLIYKASSLESGVPSRFSGSGSGTEFTLTISSLQPDDFAT |
| | YYCQQYNSYPTFGGGTKVEIKGGSGGSGGSGGSGGSGGSGGSQVQLQQWGAGLLKPSETLSLTCAVYGGSFSGYYWSWIRQPPG |
| | KGLEWIGEIDHSGSTNYNPSLKSRVTISVDTSKNQFSLKLSSVTAADTAVYYCARARGPWSFDPWGQGTLVTVSS |
| 147 | ta-scFv-9: EGFR-2 × NKp46-1 |
| | EVQLQESGPGLVKPSETLSLTCTVSGGSVSSGSYYWSWIRQPPGKGLEWIGYIYYSGSTNYNPSLKSRVTISVDTSKNQFSLKL |
| | SSVTAADTAVYYCARNPISIPAFDIWGQGTMVTVSSGGSGGSGGSGGSGGSGGSQPVLTQPPSVSVAPGKTARITCGGNNIGSK |
| | SVHWYQQKPGQAPVLVIYYDSDRPSGIPERFSGSNSGNTATLTISRVEAGDEADYYCQVWDTSSDHVLFGGGTKLTVLGGGGSD |
| | IQMTQTTSSLSASLGDRVTISCRASQDISNYLNWYQQKPDGTVKLLIYYTSRLHSGVPSRFSGSGSGTDYSLTINNLEQEDIAT |
| | YFCQQGNTRPWTFGGGTKLEIKGGSGGSGGSGGSGGSGGSGGSQVQLQQSGPELVKPGASVKMSCKASGYTFTDYVINWGKQRS |
| | GQGLEWIGEIYPGSGTNYYNEKFKAKATLTADKSSNIAYMQLSSLTSEDSAVYFCARRGRYGLYAMDYWGQGTSVTVSS |
| 148 | ta-scFv-10: EGFR-2 × NKp46-3 |
| | EVQLQESGPGLVKPSETLSLTCTVSGGSVSSGSYYWSWIRQPPGKGLEWIGYIYYSGSTNYNPSLKSRVTISVDTSKNQFSLKL |
| | SSVTAADTAVYYCARNPISIPAFDIWGQGTMVTVSSGGSGGSGGSGGSGGSGGSQPVLTQPPSVSVAPGKTARITCGGNNIGSK |
| | SVHWYQQKPGQAPVLVIYYDSDRPSGIPERFSGSNSGNTATLTISRVEAGDEADYYCQVWDTSSDHVLFGGGTKLTVLGGGGSD |
| | IVMTQSPATLSVTPGDRVSLSCRASQSISDYLHWYQQKSHESPRLLIKYASQSISGIPSRFSGSGSGSDFTLSINSVEPEDVGV |
| | YYCQNGHSFPLTFGAGTKLELKGGSGGSGGSGGSGGSGGSGGSEVQLQQSGPELVKPGASVKISCKTSGYTFTEYTMHWVKQSH |
| | GKSLEWIGGISPNIGGTSYNQKFKGKATLTVDKSSSTAYMELRSLTSEDSAVYYCARRGGSFDYWGQGTTLTVSS |
| 149 | scFv-1: CD16A-4 |
| | SYELTQPLSVSVALGQTARITCGGNNIGSKSVHWYQQKPGQAPVLVIYQDKKRPSGIPERFSGSNSGNTATLTISRAQAGDEAD |
| | YYCQVWDDYIVLFGCGTKLTVLGGSGGSGGSGGSGGSGGSGGSQVQLVQSGAEVKKPGASVKVSCKASGYTFTNYYMQWVRQAP |
| | GQCLEWMGIINPSGGVTSYAQKFQGRVTMTRDTSTSTVYMELSSLRSEDTAVYYCARGSAYYYDFADYWGQGTLVTVSS |
| 150 | scFv-2: NKG2D-1 |
| | QVQLVESGGGLVKPGGSLRLSCAASGFTFSSYGMHWVRQAPGKGLEWVAFIRYDGSNKYYADSVKGRFTISRDNSKNTLYLQMN |
| | SLRAEDTAVYYCAKDRGLGDGTYFDYWGQGTTVTVSSGGSGGSGGSGGSGGSGGSQSALTQPASVSGSPGQSITISCSGSSSNI |
| | GNNAVNWYQQLPGKAPKLLIYYDDLLPSGVSDRFSGSKSGTSAFLAISGLQSEDEADYYCAAWDDSLNGPVFGGGTKLTVL |
| 151 | scFv-3: NKG2D-2 |
| | EVQLVESGGGLVKPGGSLRLSCAASGFTFSSYGMHWVRQAPGKGLEWVAFIRYDGSNKYYADSVKGRFTISRDNSKNTLYLQMN |
| | SLRAEDTAVYYCAKDRGLGDGTYFDYWGQGTTVTVSSGGSGGSGGSGGSGGSGGSQSALTQPASVSGSPGQSITISCSGSSSNI |
| | GNNAVNWYQQLPGKAPKLLIYYDDLLPSGVSDRFSGSKSGTSAFLAISGLQSEDEADYYCAAWDDSLNGPVFGGGTKLTVL |
| 152 | scFv-4: NKG2D-3 |
| | QVQLQQWGAGLLKPSETLSLTCAVYGGSFSGYYWSWIRQPPGKGLEWIGEIDHSGSTNYNPSLKSRVTISVDTSKNQFSLKLSS |
| | VTAADTAVYYCARARGPWSFDPWGQGTLVTVSSGGSGGSGGSGGSGGSGGSDIQMTQSPSTLSASVGDRVTITCRASQSISSWL |
| | AWYQQKPGKAPKLLIYKASSLESGVPSRFSGSGSGTEFTLTISSLQPDDFATYYCQQYNSYPTFGGGTKVEIK |
| 153 | scFv-5: NKG2D-4 |
| | EVQLQQWGAGLLKPSETLSLTCAVYGGSFSGYYWSWIRQPPGKGLEWIGEIDHSGSTNYNPSLKSRVTISVDTSKNQFSLKLSS |
| | VTAADTAVYYCARARGPWSFDPWGQGTLVTVSSGGSGGSGGSGGSGGSGGSDIQMTQSPSTLSASVGDRVTITCRASQSISSWL |
| | AWYQQKPGKAPKLLIYKASSLESGVPSRFSGSGSGTEFTLTISSLQPDDFATYYCQQYNSYPTFGGGTKVEIK |
| 154 | scFv-6: NKp46-1 |
| | QVQLQQSGPELVKPGASVKMSCKASGYTFTDYVINWGKQRSGQGLEWIGEIYPGSGTNYYNEKFKAKATLTADKSSNIAYMQLS |
| | SLTSEDSAVYFCARRGRYGLYAMDYWGQGTSVTVSSGGSGGSGGSGGSGGSGGSDIQMTQTTSSLSASLGDRVTISCRASQDIS |
| | NYLNWYQQKPDGTVKLLIYYTSRLHSGVPSRFSGSGSGTDYSLTINNLEQEDIATYFCQQGNTRPWTFGGGTKLEIK |
| 155 | scFv-7: NKp46-2 |
| | EVQLQQSGPELVKPGASVKMSCKASGYTFTDYVINWGKQRSGQGLEWIGEIYPGSGTNYYNEKFKAKATLTADKSSNIAYMQLS |
| | SLTSEDSAVYFCARRGRYGLYAMDYWGQGTSVTVSSGGSGGSGGSGGSGGSGGSDIQMTQTTSSLSASLGDRVTISCRASQDIS |
| | NYLNWYQQKPDGTVKLLIYYTSRLHSGVPSRFSGSGSGTDYSLTINNLEQEDIATYFCQQGNTRPWTFGGGTKLEIK |
| 156 | scFv-8: NKp46-3 |
| | EVQLQQSGPELVKPGASVKISCKTSGYTFTEYTMHWVKQSHGKSLEWIGGISPNIGGTSYNQKFKGKATLTVDKSSSTAYMELR |
| | SLTSEDSAVYYCARRGGSFDYWGQGTTLTVSSGGSGGSGGSGGSGGSGGSDIVMTQSPATLSVTPGDRVSLSCRASQSISDYLH |
| | WYQQKSHESPRLLIKYASQSISGIPSRFSGSGSGSDFTLSINSVEPEDVGVYYCQNGHSFPLTFGAGTKLELK |
| 157 | scFv-9: CD16 (3G8) |
| | DIVLTQSPASLAVSLGQRATISCKASQSVDFDGDSFMNWYQQKPGQPPKLLIYTTSNLESGIPARFSASGSGTDFTLNIHPVEE |
| | EDTATYYCQQSNEDPYTFGGGTKLELKGGSGGSGGSGGSGGSGGSGGSQVTLKESGPGILQPSQTLSLTCSFSGFSLRTSGMGV |
| | GWIRQPSGKGLEWLAHIWWDDDKRYNPALKSRLTISKDTSSNQVFLKIASVDTADTATYYCAQINPAWFAYWGQGTLVTVSA |
| 158 | scFv-10: CD19 (MOR208) |
| | DIVMTQSPATLSLSPGERATLSCRSSKSLQNVNGNTYLYWFQQKPGQSPQLLIYRMSNLNSGVPDRFSGSGSGTEFTLTISSLE |
| | PEDFAVYYCMQHLEYPITFGAGTKLEIKGGSGGSGGSGGSGGSGGSGGSEVQLVESGGGLVKPGGSLKLSCAASGYTFTSYVMH |
| | WVRQAPGKGLEWIGYINPYNDGTKYNEKFQGRVTISSDKSISTAYMELSSLRSEDTAMYYCARGTYYYGTRVFDYWGQGTLVTV |
| | SS |
| 159 | scFv-11: CD19 (MOR208) |
| | EVQLVESGGGLVKPGGSLKLSCAASGYTFTSYVMHWVRQAPGKGLEWIGYINPYNDGTKYNEKFQGRVTISSDKSISTAYMELS |
| | SLRSEDTAMYYCARGTYYYGTRVFDYWGQGTLVTVSSGGSGGSGGSGGSGGSGGSDIVMTQSPATLSLSPGERATLSCRSSKSL |
| | QNVNGNTYLYWFQQKPGQSPQLLIYRMSNLNSGVPDRFSGSGSGTEFTLTISSLEPEDFAVYYCMQHLEYPITFGAGTKLEIK |
| 160 | scFv-12: EGFR-1 |
| | QPVLTQPPSVSVAPGKTARITCGGNNIGSKSVHWYQQKPGQAPVLVIYYDSDRPSGIPERFSGSNSGNTATLTISRVEAGDEAD |
| | YYCQVWDTSSDHVLFGGGTKLTVLGGSGGSGGSGGSGGSGGSGGSQVQLQESGPGLVKPSETLSLTCTVSGGSVSSGSYYWSWI |
| | RQPPGKGLEWIGYIYYSGSTNYNPSLKSRVTISVDTSKNQFSLKLSSVTAADTAVYYCARNPISIPAFDIWGQGTMVTVSS |
| 161 | 2Fab-scFc-1scDb-1 Chain1: |
| | EVQLVESGGGLVKPGGSLKLSCAASGYTFTSYVMHWVRQAPGKGLEWIGYINPYNDGTKYNEKFQGRVTISSDKSISTAYMELS |
| | SLRSEDTAMYYCARGTYYYGTRVFDYWGQGTLVTVSSASTKGPSVFPLAPSSKSTSGGTAALGCLVKDYFPEPVTVSWNSGALT |
| | SGVHTFPAVLQSSGLYSLSSVVTVPSSSLGTQTYICNVNHKPSNTKVDKKVEPKSCDKTHTEVQLVESGGGLVKPGGSLKLSCA |
| | ASGYTFTSYVMHWVRQAPGKGLEWIGYINPYNDGTKYNEKFQGRVTISSDKSISTAYMELSSLRSEDTAMYYCARGTYYYGTRV |
| | FDYWGQGTLVTVSSASTKGPSVFPLAPSSKSTSGGTAALGCLVKDYFPEPVTVSWNSGALTSGVHTFPAVLQSSGLYSLSSVVT |
| | VPSSSLGTQTYICNVNHKPSNTKVDKKVEPKSCDKTHTCPPCPAPEFEGGPSVFLFPPKPKDTLMISRTPEVTCVVVAVSHEDP |
| | EVKFNWYVDGVEVHNAKTKPCEEQYGSTYRCVSVLTVLHQDWLNGKEYKCKVSNKALPAPIEKTISKAKGQPREPQVYTLPPSR |
| | EEMTKNQVSLTCLVKGFYPSDIAVEWESNGQPENNYKTTPPVLDSDGSFFLYSKLTVDKSRWQQGNVFSCSVMHEALHNHYTQK |
| | SLSLSPGKGGGGSGGGGSGGGGSGGGGSGGGGSGGGGSDKTHTCPPCPAPEFEGGPSVFLFPPKPKDTLMISRTPEVTCVVVAV |
| | SHEDPEVKFNWYVDGVEVHNAKTKPCEEQYGSTYRCVSVLTVLHQDWLNGKEYKCKVSNKALPAPIEKTISKAKGQPREPQVYT |
| | LPPSREEMTKNQVSLTCLVKGFYPSDIAVEWESNGQPENNYKTTPPVLDSDGSFFLYSKLTVDKSRWQQGNVFSCSVMHEALHN |
| | HYTQKSLSLSPGGGGGSGGGGSSYELTQPLSVSVALGQTARITCGGNNIGSKSVHWYQQKPGQAPVLVIYQDKKRPSGIPERFS |
| | GSNSGNTATLTISRAQAGDEADYYCQVWDDYIVLFGCGTKLTVLGGSGGSQVQLVESGGGLVKPGGSLRLSCAASGFTFSSYGM |
| | HWVRQAPGKGLEWVAFIRYDGSNKYYADSVKGRFTISRDNSKNTLYLQMNSLRAEDTAVYYCAKDRGLGDGTYFDYWGQGTTVT |
| | VSSGGSGGSGGSGGSGGSGGSQSALTQPASVSGSPGQSITISCSGSSSNIGNNAVNWYQQLPGKAPKLLIYYDDLLPSGVSDRF |
| | SGSKSGTSAFLAISGLQSEDEADYYCAAWDDSLNGPVFGGGTKLTVLGGSGGSQVQLVQSGAEVKKPGASVKVSCKASGYTFTN |
| | YYMQWVRQAPGQCLEWMGIINPSGGVTSYAQKFQGRVTMTRDTSTSTVYMELSSLRSEDTAVYYCARGSAYYYDFADYWGQGTL |
| | VTVSS |
| 162 | 2Fab-scFc-1scDb-1 Chain2: |
| | DIVMTQSPATLSLSPGERATLSCRSSKSLQNVNGNTYLYWFQQKPGQSPQLLIYRMSNLNSGVPDRFSGSGSGTEFTLTISSLE |
| | PEDFAVYYCMQHLEYPITFGAGTKLEIKRTVAAPSVFIFPPSDEQLKSGTASVVCLLNNFYPREAKVQWKVDNALQSGNSQESV |
| | TEQDSKDSTYSLSSTLTLSKADYEKHKVYACEVTHQGLSSPVTKSFNRGEC |
| 163 | 2Fab-scFc-1scDb-2 Chain1: |
| | EVQLVESGGGLVKPGGSLKLSCAASGYTFTSYVMHWVRQAPGKGLEWIGYINPYNDGTKYNEKFQGRVTISSDKSISTAYMELS |
| | SLRSEDTAMYYCARGTYYYGTRVFDYWGQGTLVTVSSASTKGPSVFPLAPSSKSTSGGTAALGCLVKDYFPEPVTVSWNSGALT |
| | SGVHTFPAVLQSSGLYSLSSVVTVPSSSLGTQTYICNVNHKPSNTKVDKKVEPKSCDKTHTEVQLVESGGGLVKPGGSLKLSCA |
| | ASGYTFTSYVMHWVRQAPGKGLEWIGYINPYNDGTKYNEKFQGRVTISSDKSISTAYMELSSLRSEDTAMYYCARGTYYYGTRV |
| | FDYWGQGTLVTVSSASTKGPSVFPLAPSSKSTSGGTAALGCLVKDYFPEPVTVSWNSGALTSGVHTFPAVLQSSGLYSLSSVVT |
| | VPSSSLGTQTYICNVNHKPSNTKVDKKVEPKSCDKTHTCPPCPAPEFEGGPSVFLFPPKPKDTLMISRTPEVTCVVVAVSHEDP |
| | EVKFNWYVDGVEVHNAKTKPCEEQYGSTYRCVSVLTVLHQDWLNGKEYKCKVSNKALPAPIEKTISKAKGQPREPQVYTLPPSR |
| | EEMTKNQVSLTCLVKGFYPSDIAVEWESNGQPENNYKTTPPVLDSDGSFFLYSKLTVDKSRWQQGNVFSCSVMHEALHNHYTQK |
| | SLSLSPGKGGGGSGGGGSGGGGSGGGGSGGGGSGGGGSDKTHTCPPCPAPEFEGGPSVFLFPPKPKDTLMISRTPEVTCVVVAV |
| | SHEDPEVKFNWYVDGVEVHNAKTKPCEEQYGSTYRCVSVLTVLHQDWLNGKEYKCKVSNKALPAPIEKTISKAKGQPREPQVYT |
| | LPPSREEMTKNQVSLTCLVKGFYPSDIAVEWESNGQPENNYKTTPPVLDSDGSFFLYSKLTVDKSRWQQGNVFSCSVMHEALHN |
| | HYTQKSLSLSPGGGGGSGGGGSSYELTQPLSVSVALGQTARITCGGNNIGSKSVHWYQQKPGQAPVLVIYQDKKRPSGIPERFS |
| | GSNSGNTATLTISRAQAGDEADYYCQVWDDYIVLFGCGTKLTVLGGSGGSQVQLQQWGAGLLKPSETLSLTCAVYGGSFSGYYW |
| | SWIRQPPGKGLEWIGEIDHSGSTNYNPSLKSRVTISVDTSKNQFSLKLSSVTAADTAVYYCARARGPWSFDPWGQGTLVTVSSG |
| | GSGGSGGSGGSGGSGGSDIQMTQSPSTLSASVGDRVTITCRASQSISSWLAWYQQKPGKAPKLLIYKASSLESGVPSRFSGSGS |
| | GTEFTLTISSLQPDDFATYYCQQYNSYPTFGGGTKVEIKGGSGGSQVQLVQSGAEVKKPGASVKVSCKASGYTFTNYYMQWVRQ |
| | APGQCLEWMGIINPSGGVTSYAQKFQGRVTMTRDTSTSTVYMELSSLRSEDTAVYYCARGSAYYYDFADYWGQGTLVTVSS |
| 164 | 2Fab-scFc-1scDb-2 Chain2: |
| | DIVMTQSPATLSLSPGERATLSCRSSKSLQNVNGNTYLYWFQQKPGQSPQLLIYRMSNLNSGVPDRFSGSGSGTEFTLTISSLE |
| | PEDFAVYYCMQHLEYPITFGAGTKLEIKRTVAAPSVFIFPPSDEQLKSGTASVVCLLNNFYPREAKVQWKVDNALQSGNSQESV |
| | TEQDSKDSTYSLSSTLTLSKADYEKHKVYACEVTHQGLSSPVTKSFNRGEC |
| 165 | 2Fab-scFc-1scDb-3 Chain1: |
| | EVQLVESGGGLVKPGGSLKLSCAASGYTFTSYVMHWVRQAPGKGLEWIGYINPYNDGTKYNEKFQGRVTISSDKSISTAYMELS |
| | SLRSEDTAMYYCARGTYYYGTRVFDYWGQGTLVTVSSASTKGPSVFPLAPSSKSTSGGTAALGCLVKDYFPEPVTVSWNSGALT |
| | SGVHTFPAVLQSSGLYSLSSVVTVPSSSLGTQTYICNVNHKPSNTKVDKKVEPKSCDKTHTEVQLVESGGGLVKPGGSLKLSCA |
| | ASGYTFTSYVMHWVRQAPGKGLEWIGYINPYNDGTKYNEKFQGRVTISSDKSISTAYMELSSLRSEDTAMYYCARGTYYYGTRV |
| | FDYWGQGTLVTVSSASTKGPSVFPLAPSSKSTSGGTAALGCLVKDYFPEPVTVSWNSGALTSGVHTFPAVLQSSGLYSLSSVVT |
| | VPSSSLGTQTYICNVNHKPSNTKVDKKVEPKSCDKTHTCPPCPAPEFEGGPSVFLFPPKPKDTLMISRTPEVTCVVVAVSHEDP |
| | EVKFNWYVDGVEVHNAKTKPCEEQYGSTYRCVSVLTVLHQDWLNGKEYKCKVSNKALPAPIEKTISKAKGQPREPQVYTLPPSR |
| | EEMTKNQVSLTCLVKGFYPSDIAVEWESNGQPENNYKTTPPVLDSDGSFFLYSKLTVDKSRWQQGNVFSCSVMHEALHNHYTQK |
| | SLSLSPGKGGGGSGGGGSGGGGSGGGGSGGGGSGGGGSDKTHTCPPCPAPEFEGGPSVFLFPPKPKDTLMISRTPEVTCVVVAV |
| | SHEDPEVKFNWYVDGVEVHNAKTKPCEEQYGSTYRCVSVLTVLHQDWLNGKEYKCKVSNKALPAPIEKTISKAKGQPREPQVYT |
| | LPPSREEMTKNQVSLTCLVKGFYPSDIAVEWESNGQPENNYKTTPPVLDSDGSFFLYSKLTVDKSRWQQGNVFSCSVMHEALHN |
| | HYTQKSLSLSPGGGGGSGGGGSSYELTQPLSVSVALGQTARITCGGNNIGSKSVHWYQQKPGQAPVLVIYQDKKRPSGIPERFS |
| | GSNSGNTATLTISRAQAGDEADYYCQVWDDYIVLFGCGTKLTVLGGSGGSQVQLQQSGPELVKPGASVKMSCKASGYTFTDYVI |
| | NWGKQRSGQGLEWIGEIYPGSGTNYYNEKFKAKATLTADKSSNIAYMQLSSLTSEDSAVYFCARRGRYGLYAMDYWGQGTSVTV |
| | SSGGSGGSGGSGGSGGSGGSDIQMTQTTSSLSASLGDRVTISCRASQDISNYLNWYQQKPDGTVKLLIYYTSRLHSGVPSRFSG |
| | SGSGTDYSLTINNLEQEDIATYFCQQGNTRPWTFGGGTKLEIKGGSGGSQVQLVQSGAEVKKPGASVKVSCKASGYTFTNYYMQ |
| | WVRQAPGQCLEWMGIINPSGGVTSYAQKFQGRVTMTRDTSTSTVYMELSSLRSEDTAVYYCARGSAYYYDFADYWGQGTLVTVS |
| | S |
| 166 | 2Fab-scFc-1scDb-3 Chain2: |
| | DIVMTQSPATLSLSPGERATLSCRSSKSLQNVNGNTYLYWFQQKPGQSPQLLIYRMSNLNSGVPDRFSGSGSGTEFTLTISSLE |
| | PEDFAVYYCMQHLEYPITFGAGTKLEIKRTVAAPSVFIFPPSDEQLKSGTASVVCLLNNFYPREAKVQWKVDNALQSGNSQESV |
| | TEQDSKDSTYSLSSTLTLSKADYEKHKVYACEVTHQGLSSPVTKSFNRGEC |
| 167 | 2Fab-scFc-1scDb-4 Chain1: |
| | EVQLVESGGGLVKPGGSLKLSCAASGYTFTSYVMHWVRQAPGKGLEWIGYINPYNDGTKYNEKFQGRVTISSDKSISTAYMELS |
| | SLRSEDTAMYYCARGTYYYGTRVFDYWGQGTLVTVSSASTKGPSVFPLAPSSKSTSGGTAALGCLVKDYFPEPVTVSWNSGALT |
| | SGVHTFPAVLQSSGLYSLSSVVTVPSSSLGTQTYICNVNHKPSNTKVDKKVEPKSCDKTHTEVQLVESGGGLVKPGGSLKLSCA |
| | ASGYTFTSYVMHWVRQAPGKGLEWIGYINPYNDGTKYNEKFQGRVTISSDKSISTAYMELSSLRSEDTAMYYCARGTYYYGTRV |
| | FDYWGQGTLVTVSSASTKGPSVFPLAPSSKSTSGGTAALGCLVKDYFPEPVTVSWNSGALTSGVHTFPAVLQSSGLYSLSSVVT |
| | VPSSSLGTQTYICNVNHKPSNTKVDKKVEPKSCDKTHTCPPCPAPEFEGGPSVFLFPPKPKDTLMISRTPEVTCVVVAVSHEDP |
| | EVKFNWYVDGVEVHNAKTKPCEEQYGSTYRCVSVLTVLHQDWLNGKEYKCKVSNKALPAPIEKTISKAKGQPREPQVYTLPPSR |
| | EEMTKNQVSLTCLVKGFYPSDIAVEWESNGQPENNYKTTPPVLDSDGSFFLYSKLTVDKSRWQQGNVFSCSVMHEALHNHYTQK |
| | SLSLSPGKGGGGSGGGGSGGGGSGGGGSGGGGSGGGGSDKTHTCPPCPAPEFEGGPSVFLFPPKPKDTLMISRTPEVTCVVVAV |
| | SHEDPEVKFNWYVDGVEVHNAKTKPCEEQYGSTYRCVSVLTVLHQDWLNGKEYKCKVSNKALPAPIEKTISKAKGQPREPQVYT |
| | LPPSREEMTKNQVSLTCLVKGFYPSDIAVEWESNGQPENNYKTTPPVLDSDGSFFLYSKLTVDKSRWQQGNVFSCSVMHEALHN |
| | HYTQKSLSLSPGGGGGSGGGGSSYELTQPLSVSVALGQTARITCGGNNIGSKSVHWYQQKPGQAPVLVIYQDKKRPSGIPERFS |
| | GSNSGNTATLTISRAQAGDEADYYCQVWDDYIVLFGCGTKLTVLGGSGGSEVQLQQSGPELVKPGASVKISCKTSGYTFTEYTM |
| | HWVKQSHGKSLEWIGGISPNIGGTSYNQKFKGKATLTVDKSSSTAYMELRSLTSEDSAVYYCARRGGSFDYWGQGTTLTVSSGG |
| | SGGSGGSGGSGGSGGSDIVMTQSPATLSVTPGDRVSLSCRASQSISDYLHWYQQKSHESPRLLIKYASQSISGIPSRFSGSGSG |
| | SDFTLSINSVEPEDVGVYYCQNGHSFPLTFGAGTKLELKGGSGGSQVQLVQSGAEVKKPGASVKVSCKASGYTFTNYYMQWVRQ |
| | APGQCLEWMGIINPSGGVTSYAQKFQGRVTMTRDTSTSTVYMELSSLRSEDTAVYYCARGSAYYYDFADYWGQGTLVTVSS |
| 168 | 2Fab-scFc-1scDb-4 Chain2: |
| | DIVMTQSPATLSLSPGERATLSCRSSKSLQNVNGNTYLYWFQQKPGQSPQLLIYRMSNLNSGVPDRFSGSGSGTEFTLTISSLE |
| | PEDFAVYYCMQHLEYPITFGAGTKLEIKRTVAAPSVFIFPPSDEQLKSGTASVVCLLNNFYPREAKVQWKVDNALQSGNSQESV |
| | TEQDSKDSTYSLSSTLTLSKADYEKHKVYACEVTHQGLSSPVTKSFNRGEC |
| 169 | 2Fab-scFc-1scFv-1 Chain1: |
| | EVQLVESGGGLVKPGGSLKLSCAASGYTFTSYVMHWVRQAPGKGLEWIGYINPYNDGTKYNEKFQGRVTISSDKSISTAYMELS |
| | SLRSEDTAMYYCARGTYYYGTRVFDYWGQGTLVTVSSASTKGPSVFPLAPSSKSTSGGTAALGCLVKDYFPEPVTVSWNSGALT |
| | SGVHTFPAVLQSSGLYSLSSVVTVPSSSLGTQTYICNVNHKPSNTKVDKKVEPKSCDKTHTEVQLVESGGGLVKPGGSLKLSCA |
| | ASGYTFTSYVMHWVRQAPGKGLEWIGYINPYNDGTKYNEKFQGRVTISSDKSISTAYMELSSLRSEDTAMYYCARGTYYYGTRV |
| | FDYWGQGTLVTVSSASTKGPSVFPLAPSSKSTSGGTAALGCLVKDYFPEPVTVSWNSGALTSGVHTFPAVLQSSGLYSLSSVVT |
| | VPSSSLGTQTYICNVNHKPSNTKVDKKVEPKSCDKTHTCPPCPAPELLGGPSVFLFPPKPKDTLMISRTPEVTCVVVDVSHEDP |
| | EVKFNWYVDGVEVHNAKTKPCEEQYNSTYRCVSVLTVLHQDWLNGKEYKCKVSNKALPAPIEKTISKAKGQPREPQVYTLPPSR |
| | EEMTKNQVSLTCLVKGFYPSDIAVEWESNGQPENNYKTTPPVLDSDGSFFLYSKLTVDKSRWQQGNVFSCSVMHEALHNHYTQK |
| | SLSLSPGKGGGGSGGGGSGGGGSGGGGSGGGGSGGGGSDKTHTCPPCPAPELLGGPSVFLFPPKPKDTLMISRTPEVTCVVVDV |
| | SHEDPEVKFNWYVDGVEVHNAKTKPCEEQYNSTYRCVSVLTVLHQDWLNGKEYKCKVSNKALPAPIEKTISKAKGQPREPQVYT |
| | LPPSREEMTKNQVSLTCLVKGFYPSDIAVEWESNGQPENNYKTTPPVLDSDGSFFLYSKLTVDKSRWQQGNVFSCSVMHEALHN |
| | HYTQKSLSLSPGGGGGSGGGGSQVQLVESGGGLVKPGGSLRLSCAASGFTFSSYGMHWVRQAPGKGLEWVAFIRYDGSNKYYAD |
| | SVKGRFTISRDNSKNTLYLQMNSLRAEDTAVYYCAKDRGLGDGTYFDYWGQGTTVTVSSGGSGGSGGSGGSGGSGGSQSALTQP |
| | ASVSGSPGQSITISCSGSSSNIGNNAVNWYQQLPGKAPKLLIYYDDLLPSGVSDRFSGSKSGTSAFLAISGLQSEDEADYYCAA |
| | WDDSLNGPVFGGGTKLTVL |
| 170 | 2Fab-scFc-1scFv-1 Chain2: |
| | DIVMTQSPATLSLSPGERATLSCRSSKSLQNVNGNTYLYWFQQKPGQSPQLLIYRMSNLNSGVPDRFSGSGSGTEFTLTISSLE |
| | PEDFAVYYCMQHLEYPITFGAGTKLEIKRTVAAPSVFIFPPSDEQLKSGTASVVCLLNNFYPREAKVQWKVDNALQSGNSQESV |
| | TEQDSKDSTYSLSSTLTLSKADYEKHKVYACEVTHQGLSSPVTKSFNRGEC |
| 171 | 2Fab-scFc-1scFv-2 Chain1: |
| | EVQLVESGGGLVKPGGSLKLSCAASGYTFTSYVMHWVRQAPGKGLEWIGYINPYNDGTKYNEKFQGRVTISSDKSISTAYMELS |
| | SLRSEDTAMYYCARGTYYYGTRVFDYWGQGTLVTVSSASTKGPSVFPLAPSSKSTSGGTAALGCLVKDYFPEPVTVSWNSGALT |
| | SGVHTFPAVLQSSGLYSLSSVVTVPSSSLGTQTYICNVNHKPSNTKVDKKVEPKSCDKTHTEVQLVESGGGLVKPGGSLKLSCA |
| | ASGYTFTSYVMHWVRQAPGKGLEWIGYINPYNDGTKYNEKFQGRVTISSDKSISTAYMELSSLRSEDTAMYYCARGTYYYGTRV |
| | FDYWGQGTLVTVSSASTKGPSVFPLAPSSKSTSGGTAALGCLVKDYFPEPVTVSWNSGALTSGVHTFPAVLQSSGLYSLSSVVT |
| | VPSSSLGTQTYICNVNHKPSNTKVDKKVEPKSCDKTHTCPPCPAPELLGGPSVFLFPPKPKDTLMISRTPEVTCVVVDVSHEDP |
| | EVKFNWYVDGVEVHNAKTKPCEEQYNSTYRCVSVLTVLHQDWLNGKEYKCKVSNKALPAPIEKTISKAKGQPREPQVYTLPPSR |
| | EEMTKNQVSLTCLVKGFYPSDIAVEWESNGQPENNYKTTPPVLDSDGSFFLYSKLTVDKSRWQQGNVFSCSVMHEALHNHYTQK |
| | SLSLSPGKGGGGSGGGGSGGGGSGGGGSGGGGSGGGGSDKTHTCPPCPAPELLGGPSVFLFPPKPKDTLMISRTPEVTCVVVDV |
| | SHEDPEVKFNWYVDGVEVHNAKTKPCEEQYNSTYRCVSVLTVLHQDWLNGKEYKCKVSNKALPAPIEKTISKAKGQPREPQVYT |
| | LPPSREEMTKNQVSLTCLVKGFYPSDIAVEWESNGQPENNYKTTPPVLDSDGSFFLYSKLTVDKSRWQQGNVFSCSVMHEALHN |
| | HYTQKSLSLSPGGGGGSGGGGSQVQLQQWGAGLLKPSETLSLTCAVYGGSFSGYYWSWIRQPPGKGLEWIGEIDHSGSTNYNPS |
| | LKSRVTISVDTSKNQFSLKLSSVTAADTAVYYCARARGPWSFDPWGQGTLVTVSSGGSGGSGGSGGSGGSGGSDIQMTQSPSTL |
| | SASVGDRVTITCRASQSISSWLAWYQQKPGKAPKLLIYKASSLESGVPSRFSGSGSGTEFTLTISSLQPDDFATYYCQQYNSYP |
| | TFGGGTKVEIKS |
| 172 | 2Fab-scFc-1scFv-2 Chain2: |
| | DIVMTQSPATLSLSPGERATLSCRSSKSLQNVNGNTYLYWFQQKPGQSPQLLIYRMSNLNSGVPDRFSGSGSGTEFTLTISSLE |
| | PEDFAVYYCMQHLEYPITFGAGTKLEIKRTVAAPSVFIFPPSDEQLKSGTASVVCLLNNFYPREAKVQWKVDNALQSGNSQESV |
| | TEQDSKDSTYSLSSTLTLSKADYEKHKVYACEVTHQGLSSPVTKSFNRGEC |
| 173 | 2Fab-scFc-1scFv-3 Chain1: |
| | EVQLVESGGGLVKPGGSLKLSCAASGYTFTSYVMHWVRQAPGKGLEWIGYINPYNDGTKYNEKFQGRVTISSDKSISTAYMELS |
| | SLRSEDTAMYYCARGTYYYGTRVFDYWGQGTLVTVSSASTKGPSVFPLAPSSKSTSGGTAALGCLVKDYFPEPVTVSWNSGALT |
| | SGVHTFPAVLQSSGLYSLSSVVTVPSSSLGTQTYICNVNHKPSNTKVDKKVEPKSCDKTHTEVQLVESGGGLVKPGGSLKLSCA |
| | ASGYTFTSYVMHWVRQAPGKGLEWIGYINPYNDGTKYNEKFQGRVTISSDKSISTAYMELSSLRSEDTAMYYCARGTYYYGTRV |
| | FDYWGQGTLVTVSSASTKGPSVFPLAPSSKSTSGGTAALGCLVKDYFPEPVTVSWNSGALTSGVHTFPAVLQSSGLYSLSSVVT |
| | VPSSSLGTQTYICNVNHKPSNTKVDKKVEPKSCDKTHTCPPCPAPELLGGPSVFLFPPKPKDTLMISRTPEVTCVVVDVSHEDP |
| | EVKFNWYVDGVEVHNAKTKPCEEQYNSTYRCVSVLTVLHQDWLNGKEYKCKVSNKALPAPIEKTISKAKGQPREPQVYTLPPSR |
| | EEMTKNQVSLTCLVKGFYPSDIAVEWESNGQPENNYKTTPPVLDSDGSFFLYSKLTVDKSRWQQGNVFSCSVMHEALHNHYTQK |
| | SLSLSPGKGGGGSGGGGSGGGGSGGGGSGGGGSGGGGSDKTHTCPPCPAPELLGGPSVFLFPPKPKDTLMISRTPEVTCVVVDV |
| | SHEDPEVKFNWYVDGVEVHNAKTKPCEEQYNSTYRCVSVLTVLHQDWLNGKEYKCKVSNKALPAPIEKTISKAKGQPREPQVYT |
| | LPPSREEMTKNQVSLTCLVKGFYPSDIAVEWESNGQPENNYKTTPPVLDSDGSFFLYSKLTVDKSRWQQGNVFSCSVMHEALHN |
| | HYTQKSLSLSPGGGGGSGGGGSQVQLQQSGPELVKPGASVKMSCKASGYTFTDYVINWGKQRSGQGLEWIGEIYPGSGTNYYNE |
| | KFKAKATLTADKSSNIAYMQLSSLTSEDSAVYFCARRGRYGLYAMDYWGQGTSVTVSSGGSGGSGGSGGSGGSGGSDIQMTQTT |
| | SSLSASLGDRVTISCRASQDISNYLNWYQQKPDGTVKLLIYYTSRLHSGVPSRFSGSGSGTDYSLTINNLEQEDIATYFCQQGN |
| | TRPWTFGGGTKLEIK |
| 174 | 2Fab-scFc-1scFv-3 Chain2: |
| | DIVMTQSPATLSLSPGERATLSCRSSKSLQNVNGNTYLYWFQQKPGQSPQLLIYRMSNLNSGVPDRFSGSGSGTEFTLTISSLE |
| | PEDFAVYYCMQHLEYPITFGAGTKLEIKRTVAAPSVFIFPPSDEQLKSGTASVVCLLNNFYPREAKVQWKVDNALQSGNSQESV |
| | TEQDSKDSTYSLSSTLTLSKADYEKHKVYACEVTHQGLSSPVTKSFNRGEC |
| 175 | 2Fab-scFc-1scFv-4 Chain1: |
| | EVQLVESGGGLVKPGGSLKLSCAASGYTFTSYVMHWVRQAPGKGLEWIGYINPYNDGTKYNEKFQGRVTISSDKSISTAYMELS |
| | SLRSEDTAMYYCARGTYYYGTRVFDYWGQGTLVTVSSASTKGPSVFPLAPSSKSTSGGTAALGCLVKDYFPEPVTVSWNSGALT |
| | SGVHTFPAVLQSSGLYSLSSVVTVPSSSLGTQTYICNVNHKPSNTKVDKKVEPKSCDKTHTEVQLVESGGGLVKPGGSLKLSCA |
| | ASGYTFTSYVMHWVRQAPGKGLEWIGYINPYNDGTKYNEKFQGRVTISSDKSISTAYMELSSLRSEDTAMYYCARGTYYYGTRV |
| | FDYWGQGTLVTVSSASTKGPSVFPLAPSSKSTSGGTAALGCLVKDYFPEPVTVSWNSGALTSGVHTFPAVLQSSGLYSLSSVVT |
| | VPSSSLGTQTYICNVNHKPSNTKVDKKVEPKSCDKTHTCPPCPAPELLGGPSVFLFPPKPKDTLMISRTPEVTCVVVDVSHEDP |
| | EVKFNWYVDGVEVHNAKTKPCEEQYNSTYRCVSVLTVLHQDWLNGKEYKCKVSNKALPAPIEKTISKAKGQPREPQVYTLPPSR |
| | EEMTKNQVSLTCLVKGFYPSDIAVEWESNGQPENNYKTTPPVLDSDGSFFLYSKLTVDKSRWQQGNVFSCSVMHEALHNHYTQK |
| | SLSLSPGKGGGGSGGGGSGGGGSGGGGSGGGGSGGGGSDKTHTCPPCPAPELLGGPSVFLFPPKPKDTLMISRTPEVTCVVVDV |
| | SHEDPEVKFNWYVDGVEVHNAKTKPCEEQYNSTYRCVSVLTVLHQDWLNGKEYKCKVSNKALPAPIEKTISKAKGQPREPQVYT |
| | LPPSREEMTKNQVSLTCLVKGFYPSDIAVEWESNGQPENNYKTTPPVLDSDGSFFLYSKLTVDKSRWQQGNVFSCSVMHEALHN |
| | HYTQKSLSLSPGGGGGSGGGGSEVQLQQSGPELVKPGASVKISCKTSGYTFTEYTMHWVKQSHGKSLEWIGGISPNIGGTSYNQ |
| | KFKGKATLTVDKSSSTAYMELRSLTSEDSAVYYCARRGGSFDYWGQGTTLTVSSGGSGGSGGSGGSGGSGGSDIVMTQSPATLS |
| | VTPGDRVSLSCRASQSISDYLHWYQQKSHESPRLLIKYASQSISGIPSRFSGSGSGSDFTLSINSVEPEDVGVYYCQNGHSFPL |
| | TFGAGTKLELK |
| 176 | 2Fab-scFc-1scFv-4 Chain2: |
| | DIVMTQSPATLSLSPGERATLSCRSSKSLQNVNGNTYLYWFQQKPGQSPQLLIYRMSNLNSGVPDRFSGSGSGTEFTLTISSLE |
| | PEDFAVYYCMQHLEYPITFGAGTKLEIKRTVAAPSVFIFPPSDEQLKSGTASVVCLLNNFYPREAKVQWKVDNALQSGNSQESV |
| | TEQDSKDSTYSLSSTLTLSKADYEKHKVYACEVTHQGLSSPVTKSFNRGEC |
| 177 | 2Fab-1scDb-AFc-1 Chain1: |
| | EVQLVESGGGLVKPGGSLKLSCAASGYTFTSYVMHWVRQAPGKGLEWIGYINPYNDGTKYNEKFQGRVTISSDKSISTAYMELS |
| | SLRSEDTAMYYCARGTYYYGTRVFDYWGQGTLVTVSSASTKGPSVFPLAPSSKSTSGGTAALGCLVKDYFPEPVTVSWNSGALT |
| | SGVHTFPAVLQSSGLYSLSSVVTVPSSSLGTQTYICNVNHKPSNTKVDKKVEPKSCDKTHTEVQLVESGGGLVKPGGSLKLSCA |
| | ASGYTFTSYVMHWVRQAPGKGLEWIGYINPYNDGTKYNEKFQGRVTISSDKSISTAYMELSSLRSEDTAMYYCARGTYYYGTRV |
| | FDYWGQGTLVTVSSASTKGPSVFPLAPSSKSTSGGTAALGCLVKDYFPEPVTVSWNSGALTSGVHTFPAVLQSSGLYSLSSVVT |
| | VPSSSLGTQTYICNVNHKPSNTKVDKKVEPKSCDKTHTCPPCPAPEFEGGPSVFLFPPKPKDTLMISRTPEVTCVVVAVSHEDP |
| | EVKFNWYVDGVEVHNAKTKPREEQYGSTYRVVSVLTVLHQDWLNGKEYKCKVSNKALPAPIEKTISKAKGQPREPQVYTLPPSR |
| | EEMTKNQVSLWCLVKGFYPSDIAVEWESNGQPENNYKTTPPVLDSDGSFFLYSKLTVDKSRWQQGNVFSCSVMHEALHNHYTQK |
| | SLSLSPG |
| 178 | 2Fab-1scDb-AFc-1 Chain2: |
| | DIVMTQSPATLSLSPGERATLSCRSSKSLQNVNGNTYLYWFQQKPGQSPQLLIYRMSNLNSGVPDRFSGSGSGTEFTLTISSLE |
| | PEDFAVYYCMQHLEYPITFGAGTKLEIKRTVAAPSVFIFPPSDEQLKSGTASVVCLLNNFYPREAKVQWKVDNALQSGNSQESV |
| | TEQDSKDSTYSLSSTLTLSKADYEKHKVYACEVTHQGLSSPVTKSFNRGEC |
| 179 | 2Fab-1scDb-AFc-1 Chain3: |
| | SYELTQPLSVSVALGQTARITCGGNNIGSKSVHWYQQKPGQAPVLVIYQDKKRPSGIPERFSGSNSGNTATLTISRAQAGDEAD |
| | YYCQVWDDYIVLFGCGTKLTVLGGSGGSQVQLVESGGGLVKPGGSLRLSCAASGFTFSSYGMHWVRQAPGKGLEWVAFIRYDGS |
| | NKYYADSVKGRFTISRDNSKNTLYLQMNSLRAEDTAVYYCAKDRGLGDGTYFDYWGQGTTVTVSSGGSGGSGGSGGSGGSGGSQ |
| | SALTQPASVSGSPGQSITISCSGSSSNIGNNAVNWYQQLPGKAPKLLIYYDDLLPSGVSDRFSGSKSGTSAFLAISGLQSEDEA |
| | DYYCAAWDDSLNGPVFGGGTKLTVLGGSGGSQVQLVQSGAEVKKPGASVKVSCKASGYTFTNYYMQWVRQAPGQCLEWMGIINP |
| | SGGVTSYAQKFQGRVTMTRDTSTSTVYMELSSLRSEDTAVYYCARGSAYYYDFADYWGQGTLVTVSSDKTHTCPPCPAPEFEGG |
| | PSVFLFPPKPKDTLMISRTPEVTCVVVAVSHEDPEVKFNWYVDGVEVHNAKTKPREEQYGSTYRVVSVLTVLHQDWLNGKEYKC |
| | KVSNKALPAPIEKTISKAKGQPREPQVYTLPPSREEMTKNQVSLSCAVKGFYPSDIAVEWESNGQPENNYKTTPPVLDSDGSFF |
| | LVSKLTVDKSRWQQGNVFSCSVMHEALHNHYTQKSLSLSPG |
| 180 | 2Fab-1scDb-AFc-2 Chain1: |
| | EVQLVESGGGLVKPGGSLKLSCAASGYTFTSYVMHWVRQAPGKGLEWIGYINPYNDGTKYNEKFQGRVTISSDKSISTAYMELS |
| | SLRSEDTAMYYCARGTYYYGTRVFDYWGQGTLVTVSSASTKGPSVFPLAPSSKSTSGGTAALGCLVKDYFPEPVTVSWNSGALT |
| | SGVHTFPAVLQSSGLYSLSSVVTVPSSSLGTQTYICNVNHKPSNTKVDKKVEPKSCDKTHTEVQLVESGGGLVKPGGSLKLSCA |
| | ASGYTFTSYVMHWVRQAPGKGLEWIGYINPYNDGTKYNEKFQGRVTISSDKSISTAYMELSSLRSEDTAMYYCARGTYYYGTRV |
| | FDYWGQGTLVTVSSASTKGPSVFPLAPSSKSTSGGTAALGCLVKDYFPEPVTVSWNSGALTSGVHTFPAVLQSSGLYSLSSVVT |
| | VPSSSLGTQTYICNVNHKPSNTKVDKKVEPKSCDKTHTCPPCPAPEFEGGPSVFLFPPKPKDTLMISRTPEVTCVVVAVSHEDP |
| | EVKFNWYVDGVEVHNAKTKPREEQYGSTYRVVSVLTVLHQDWLNGKEYKCKVSNKALPAPIEKTISKAKGQPREPQVYTLPPSR |
| | EEMTKNQVSLWCLVKGFYPSDIAVEWESNGQPENNYKTTPPVLDSDGSFFLYSKLTVDKSRWQQGNVFSCSVMHEALHNHYTQK |
| | SLSLSPG |
| 181 | 2Fab-1scDb-AFc-2 Chain2: |
| | DIVMTQSPATLSLSPGERATLSCRSSKSLQNVNGNTYLYWFQQKPGQSPQLLIYRMSNLNSGVPDRFSGSGSGTEFTLTISSLE |
| | PEDFAVYYCMQHLEYPITFGAGTKLEIKRTVAAPSVFIFPPSDEQLKSGTASVVCLLNNFYPREAKVQWKVDNALQSGNSQESV |
| | TEQDSKDSTYSLSSTLTLSKADYEKHKVYACEVTHQGLSSPVTKSFNRGEC |
| 182 | 2Fab-1scDb-AFc-2 Chain3: |
| | SYELTQPLSVSVALGQTARITCGGNNIGSKSVHWYQQKPGQAPVLVIYQDKKRPSGIPERFSGSNSGNTATLTISRAQAGDEAD |
| | YYCQVWDDYIVLFGCGTKLTVLGGSGGSQVQLQQWGAGLLKPSETLSLTCAVYGGSFSGYYWSWIRQPPGKGLEWIGEIDHSGS |
| | TNYNPSLKSRVTISVDTSKNQFSLKLSSVTAADTAVYYCARARGPWSFDPWGQGTLVTVSSGGSGGSGGSGGSGGSGGSDIQMT |
| | QSPSTLSASVGDRVTITCRASQSISSWLAWYQQKPGKAPKLLIYKASSLESGVPSRFSGSGSGTEFTLTISSLQPDDFATYYCQ |
| | QYNSYPTFGGGTKVEIKGGSGGSQVQLVQSGAEVKKPGASVKVSCKASGYTFTNYYMQWVRQAPGQCLEWMGIINPSGGVTSYA |
| | QKFQGRVTMTRDTSTSTVYMELSSLRSEDTAVYYCARGSAYYYDFADYWGQGTLVTVSSDKTHTCPPCPAPEFEGGPSVFLFPP |
| | KPKDTLMISRTPEVTCVVVAVSHEDPEVKFNWYVDGVEVHNAKTKPREEQYGSTYRVVSVLTVLHQDWLNGKEYKCKVSNKALP |
| | APIEKTISKAKGQPREPQVYTLPPSREEMTKNQVSLSCAVKGFYPSDIAVEWESNGQPENNYKTTPPVLDSDGSFFLVSKLTVD |
| | KSRWQQGNVFSCSVMHEALHNHYTQKSLSLSPG |
| 183 | 2Fab-1scDb-AFc-3 Chain1: |
| | EVQLVESGGGLVKPGGSLKLSCAASGYTFTSYVMHWVRQAPGKGLEWIGYINPYNDGTKYNEKFQGRVTISSDKSISTAYMELS |
| | SLRSEDTAMYYCARGTYYYGTRVFDYWGQGTLVTVSSASTKGPSVFPLAPSSKSTSGGTAALGCLVKDYFPEPVTVSWNSGALT |
| | SGVHTFPAVLQSSGLYSLSSVVTVPSSSLGTQTYICNVNHKPSNTKVDKKVEPKSCDKTHTEVQLVESGGGLVKPGGSLKLSCA |
| | ASGYTFTSYVMHWVRQAPGKGLEWIGYINPYNDGTKYNEKFQGRVTISSDKSISTAYMELSSLRSEDTAMYYCARGTYYYGTRV |
| | FDYWGQGTLVTVSSASTKGPSVFPLAPSSKSTSGGTAALGCLVKDYFPEPVTVSWNSGALTSGVHTFPAVLQSSGLYSLSSVVT |
| | VPSSSLGTQTYICNVNHKPSNTKVDKKVEPKSCDKTHTCPPCPAPEFEGGPSVFLFPPKPKDTLMISRTPEVTCVVVAVSHEDP |
| | EVKFNWYVDGVEVHNAKTKPREEQYGSTYRVVSVLTVLHQDWLNGKEYKCKVSNKALPAPIEKTISKAKGQPREPQVYTLPPSR |
| | EEMTKNQVSLWCLVKGFYPSDIAVEWESNGQPENNYKTTPPVLDSDGSFFLYSKLTVDKSRWQQGNVFSCSVMHEALHNHYTQK |
| | SLSLSPG |
| 184 | 2Fab-1scDb-AFc-3 Chain2: |
| | DIVMTQSPATLSLSPGERATLSCRSSKSLQNVNGNTYLYWFQQKPGQSPQLLIYRMSNLNSGVPDRFSGSGSGTEFTLTISSLE |
| | PEDFAVYYCMQHLEYPITFGAGTKLEIKRTVAAPSVFIFPPSDEQLKSGTASVVCLLNNFYPREAKVQWKVDNALQSGNSQESV |
| | TEQDSKDSTYSLSSTLTLSKADYEKHKVYACEVTHQGLSSPVTKSFNRGEC |
| 185 | 2Fab-1scDb-AFc-3 Chain3: |
| | SYELTQPLSVSVALGQTARITCGGNNIGSKSVHWYQQKPGQAPVLVIYQDKKRPSGIPERFSGSNSGNTATLTISRAQAGDEAD |
| | YYCQVWDDYIVLFGCGTKLTVLGGSGGSQVQLQQSGPELVKPGASVKMSCKASGYTFTDYVINWGKQRSGQGLEWIGEIYPGSG |
| | TNYYNEKFKAKATLTADKSSNIAYMQLSSLTSEDSAVYFCARRGRYGLYAMDYWGQGTSVTVSSGGSGGSGGSGGSGGSGGSDI |
| | QMTQTTSSLSASLGDRVTISCRASQDISNYLNWYQQKPDGTVKLLIYYTSRLHSGVPSRFSGSGSGTDYSLTINNLEQEDIATY |
| | FCQQGNTRPWTFGGGTKLEIKGGSGGSQVQLVQSGAEVKKPGASVKVSCKASGYTFTNYYMQWVRQAPGQCLEWMGIINPSGGV |
| | TSYAQKFQGRVTMTRDTSTSTVYMELSSLRSEDTAVYYCARGSAYYYDFADYWGQGTLVTVSSDKTHTCPPCPAPEFEGGPSVF |
| | LFPPKPKDTLMISRTPEVTCVVVAVSHEDPEVKFNWYVDGVEVHNAKTKPREEQYGSTYRVVSVLTVLHQDWLNGKEYKCKVSN |
| | KALPAPIEKTISKAKGQPREPQVYTLPPSREEMTKNQVSLSCAVKGFYPSDIAVEWESNGQPENNYKTTPPVLDSDGSFFLVSK |
| | LTVDKSRWQQGNVFSCSVMHEALHNHYTQKSLSLSPG |
| 186 | 2Fab-1scDb-AFc-4 Chain1: |
| | EVQLVESGGGLVKPGGSLKLSCAASGYTFTSYVMHWVRQAPGKGLEWIGYINPYNDGTKYNEKFQGRVTISSDKSISTAYMELS |
| | SLRSEDTAMYYCARGTYYYGTRVFDYWGQGTLVTVSSASTKGPSVFPLAPSSKSTSGGTAALGCLVKDYFPEPVTVSWNSGALT |
| | SGVHTFPAVLQSSGLYSLSSVVTVPSSSLGTQTYICNVNHKPSNTKVDKKVEPKSCDKTHTEVQLVESGGGLVKPGGSLKLSCA |
| | ASGYTFTSYVMHWVRQAPGKGLEWIGYINPYNDGTKYNEKFQGRVTISSDKSISTAYMELSSLRSEDTAMYYCARGTYYYGTRV |
| | FDYWGQGTLVTVSSASTKGPSVFPLAPSSKSTSGGTAALGCLVKDYFPEPVTVSWNSGALTSGVHTFPAVLQSSGLYSLSSVVT |
| | VPSSSLGTQTYICNVNHKPSNTKVDKKVEPKSCDKTHTCPPCPAPEFEGGPSVFLFPPKPKDTLMISRTPEVTCVVVAVSHEDP |
| | EVKFNWYVDGVEVHNAKTKPREEQYGSTYRVVSVLTVLHQDWLNGKEYKCKVSNKALPAPIEKTISKAKGQPREPQVYTLPPSR |
| | EEMTKNQVSLWCLVKGFYPSDIAVEWESNGQPENNYKTTPPVLDSDGSFFLYSKLTVDKSRWQQGNVFSCSVMHEALHNHYTQK |
| | SLSLSPG |
| 187 | 2Fab-1scDb-AFc-4 Chain2: |
| | DIVMTQSPATLSLSPGERATLSCRSSKSLQNVNGNTYLYWFQQKPGQSPQLLIYRMSNLNSGVPDRFSGSGSGTEFTLTISSLE |
| | PEDFAVYYCMQHLEYPITFGAGTKLEIKRTVAAPSVFIFPPSDEQLKSGTASVVCLLNNFYPREAKVQWKVDNALQSGNSQESV |
| | TEQDSKDSTYSLSSTLTLSKADYEKHKVYACEVTHQGLSSPVTKSFNRGEC |
| 188 | 2Fab-1scDb-AFc-4 Chain3: |
| | SYELTQPLSVSVALGQTARITCGGNNIGSKSVHWYQQKPGQAPVLVIYQDKKRPSGIPERFSGSNSGNTATLTISRAQAGDEAD |
| | YYCQVWDDYIVLFGCGTKLTVLGGSGGSEVQLQQSGPELVKPGASVKISCKTSGYTFTEYTMHWVKQSHGKSLEWIGGISPNIG |
| | GTSYNQKFKGKATLTVDKSSSTAYMELRSLTSEDSAVYYCARRGGSFDYWGQGTTLTVSSGGSGGSGGSGGSGGSGGSDIVMTQ |
| | SPATLSVTPGDRVSLSCRASQSISDYLHWYQQKSHESPRLLIKYASQSISGIPSRFSGSGSGSDFTLSINSVEPEDVGVYYCQN |
| | GHSFPLTFGAGTKLELKGGSGGSQVQLVQSGAEVKKPGASVKVSCKASGYTFTNYYMQWVRQAPGQCLEWMGIINPSGGVTSYA |
| | QKFQGRVTMTRDTSTSTVYMELSSLRSEDTAVYYCARGSAYYYDFADYWGQGTLVTVSSDKTHTCPPCPAPEFEGGPSVFLFPP |
| | KPKDTLMISRTPEVTCVVVAVSHEDPEVKFNWYVDGVEVHNAKTKPREEQYGSTYRVVSVLTVLHQDWLNGKEYKCKVSNKALP |
| | APIEKTISKAKGQPREPQVYTLPPSREEMTKNQVSLSCAVKGFYPSDIAVEWESNGQPENNYKTTPPVLDSDGSFFLVSKLTVD |
| | KSRWQQGNVFSCSVMHEALHNHYTQKSLSLSPG |
| 189 | 2Fab-1scDb-AFc-5 Chain1: |
| | EVQLQESGPGLVKPSETLSLTCTVSGGSVSSGSYYWSWIRQPPGKGLEWIGYIYYSGSTNYNPSLKSRVTISVDTSKNQFSLKL |
| | SSVTAADTAVYYCARNPISIPAFDIWGQGTMVTVSSASTKGPSVFPLAPSSKSTSGGTAALGCLVKDYFPEPVTVSWNSGALTS |
| | GVHTFPAVLQSSGLYSLSSVVTVPSSSLGTQTYICNVNHKPSNTKVDKKVEPKSCDKTHTQVQLQESGPGLVKPSETLSLTCTV |
| | SGGSVSSGSYYWSWIRQPPGKGLEWIGYIYYSGSTNYNPSLKSRVTISVDTSKNQFSLKLSSVTAADTAVYYCARNPISIPAFD |
| | IWGQGTMVTVSSASTKGPSVFPLAPSSKSTSGGTAALGCLVKDYFPEPVTVSWNSGALTSGVHTFPAVLQSSGLYSLSSVVTVP |
| | SSSLGTQTYICNVNHKPSNTKVDKKVEPKSCDKTHTCPPCPAPEFEGGPSVFLFPPKPKDTLMISRTPEVTCVVVAVSHEDPEV |
| | KFNWYVDGVEVHNAKTKPREEQYGSTYRVVSVLTVLHQDWLNGKEYKCKVSNKALPAPIEKTISKAKGQPREPQVYTLPPSREE |
| | MTKNQVSLWCLVKGFYPSDIAVEWESNGQPENNYKTTPPVLDSDGSFFLYSKLTVDKSRWQQGNVFSCSVMHEALHNHYTQKSL |
| | SLSPG |
| 190 | 2Fab-1scDb-AFc-5 Chain2: |
| | QPVLTQPPSVSVAPGKTARITCGGNNIGSKSVHWYQQKPGQAPVLVIYYDSDRPSGIPERFSGSNSGNTATLTISRVEAGDEAD |
| | YYCQVWDTSSDHVLFGGGTKLTVLGQPKAAPSVTLFPPSSEELQANKATLVCLISDFYPGAVTVAWKADSSPVKAGVETTTPSK |
| | QSNNKYAASSYLSLTPEQWKSHRSYSCQVTHEGSTVEKTVAPTECS |
| 191 | 2Fab-1scDb-AFc-5 Chain3: |
| | SYELTQPLSVSVALGQTARITCGGNNIGSKSVHWYQQKPGQAPVLVIYQDKKRPSGIPERFSGSNSGNTATLTISRAQAGDEAD |
| | YYCQVWDDYIVLFGCGTKLTVLGGSGGSQVQLVESGGGLVKPGGSLRLSCAASGFTFSSYGMHWVRQAPGKGLEWVAFIRYDGS |
| | NKYYADSVKGRFTISRDNSKNTLYLQMNSLRAEDTAVYYCAKDRGLGDGTYFDYWGQGTTVTVSSGGSGGSGGSGGSGGSGGSQ |
| | SALTQPASVSGSPGQSITISCSGSSSNIGNNAVNWYQQLPGKAPKLLIYYDDLLPSGVSDRFSGSKSGTSAFLAISGLQSEDEA |
| | DYYCAAWDDSLNGPVFGGGTKLTVLGGSGGSQVQLVQSGAEVKKPGASVKVSCKASGYTFTNYYMQWVRQAPGQCLEWMGIINP |
| | SGGVTSYAQKFQGRVTMTRDTSTSTVYMELSSLRSEDTAVYYCARGSAYYYDFADYWGQGTLVTVSSDKTHTCPPCPAPEFEGG |
| | PSVFLFPPKPKDTLMISRTPEVTCVVVAVSHEDPEVKFNWYVDGVEVHNAKTKPREEQYGSTYRVVSVLTVLHQDWLNGKEYKC |
| | KVSNKALPAPIEKTISKAKGQPREPQVYTLPPSREEMTKNQVSLSCAVKGFYPSDIAVEWESNGQPENNYKTTPPVLDSDGSFF |
| | LVSKLTVDKSRWQQGNVFSCSVMHEALHNHYTQKSLSLSPG |
| 192 | 2Fab-1scDb-AFc-6 Chain1: |
| | EVQLQESGPGLVKPSETLSLTCTVSGGSVSSGSYYWSWIRQPPGKGLEWIGYIYYSGSTNYNPSLKSRVTISVDTSKNQFSLKL |
| | SSVTAADTAVYYCARNPISIPAFDIWGQGTMVTVSSASTKGPSVFPLAPSSKSTSGGTAALGCLVKDYFPEPVTVSWNSGALTS |
| | GVHTFPAVLQSSGLYSLSSVVTVPSSSLGTQTYICNVNHKPSNTKVDKKVEPKSCDKTHTQVQLQESGPGLVKPSETLSLTCTV |
| | SGGSVSSGSYYWSWIRQPPGKGLEWIGYIYYSGSTNYNPSLKSRVTISVDTSKNQFSLKLSSVTAADTAVYYCARNPISIPAFD |
| | IWGQGTMVTVSSASTKGPSVFPLAPSSKSTSGGTAALGCLVKDYFPEPVTVSWNSGALTSGVHTFPAVLQSSGLYSLSSVVTVP |
| | SSSLGTQTYICNVNHKPSNTKVDKKVEPKSCDKTHTCPPCPAPEFEGGPSVFLFPPKPKDTLMISRTPEVTCVVVAVSHEDPEV |
| | KFNWYVDGVEVHNAKTKPREEQYGSTYRVVSVLTVLHQDWLNGKEYKCKVSNKALPAPIEKTISKAKGQPREPQVYTLPPSREE |
| | MTKNQVSLWCLVKGFYPSDIAVEWESNGQPENNYKTTPPVLDSDGSFFLYSKLTVDKSRWQQGNVFSCSVMHEALHNHYTQKSL |
| | SLSPG |
| 193 | 2Fab-1scDb-AFc-6 Chain2: |
| | QPVLTQPPSVSVAPGKTARITCGGNNIGSKSVHWYQQKPGQAPVLVIYYDSDRPSGIPERFSGSNSGNTATLTISRVEAGDEAD |
| | YYCQVWDTSSDHVLFGGGTKLTVLGQPKAAPSVTLFPPSSEELQANKATLVCLISDFYPGAVTVAWKADSSPVKAGVETTTPSK |
| | QSNNKYAASSYLSLTPEQWKSHRSYSCQVTHEGSTVEKTVAPTECS |
| 194 | 2Fab-1scDb-AFc-6 Chain3: |
| | SYELTQPLSVSVALGQTARITCGGNNIGSKSVHWYQQKPGQAPVLVIYQDKKRPSGIPERFSGSNSGNTATLTISRAQAGDEAD |
| | YYCQVWDDYIVLFGCGTKLTVLGGSGGSQVQLQQWGAGLLKPSETLSLTCAVYGGSFSGYYWSWIRQPPGKGLEWIGEIDHSGS |
| | TNYNPSLKSRVTISVDTSKNQFSLKLSSVTAADTAVYYCARARGPWSFDPWGQGTLVTVSSGGSGGSGGSGGSGGSGGSDIQMT |
| | QSPSTLSASVGDRVTITCRASQSISSWLAWYQQKPGKAPKLLIYKASSLESGVPSRFSGSGSGTEFTLTISSLQPDDFATYYCQ |
| | QYNSYPTFGGGTKVEIKGGSGGSQVQLVQSGAEVKKPGASVKVSCKASGYTFTNYYMQWVRQAPGQCLEWMGIINPSGGVTSYA |
| | QKFQGRVTMTRDTSTSTVYMELSSLRSEDTAVYYCARGSAYYYDFADYWGQGTLVTVSSDKTHTCPPCPAPEFEGGPSVFLFPP |
| | KPKDTLMISRTPEVTCVVVAVSHEDPEVKFNWYVDGVEVHNAKTKPREEQYGSTYRVVSVLTVLHQDWLNGKEYKCKVSNKALP |
| | APIEKTISKAKGQPREPQVYTLPPSREEMTKNQVSLSCAVKGFYPSDIAVEWESNGQPENNYKTTPPVLDSDGSFFLVSKLTVD |
| | KSRWQQGNVFSCSVMHEALHNHYTQKSLSLSPG |
| 195 | 2Fab-1scDb-AFc-7 Chain1: |
| | EVQLQESGPGLVKPSETLSLTCTVSGGSVSSGSYYWSWIRQPPGKGLEWIGYIYYSGSTNYNPSLKSRVTISVDTSKNQFSLKL |
| | SSVTAADTAVYYCARNPISIPAFDIWGQGTMVTVSSASTKGPSVFPLAPSSKSTSGGTAALGCLVKDYFPEPVTVSWNSGALTS |
| | GVHTFPAVLQSSGLYSLSSVVTVPSSSLGTQTYICNVNHKPSNTKVDKKVEPKSCDKTHTQVQLQESGPGLVKPSETLSLTCTV |
| | SGGSVSSGSYYWSWIRQPPGKGLEWIGYIYYSGSTNYNPSLKSRVTISVDTSKNQFSLKLSSVTAADTAVYYCARNPISIPAFD |
| | IWGQGTMVTVSSASTKGPSVFPLAPSSKSTSGGTAALGCLVKDYFPEPVTVSWNSGALTSGVHTFPAVLQSSGLYSLSSVVTVP |
| | SSSLGTQTYICNVNHKPSNTKVDKKVEPKSCDKTHTCPPCPAPEFEGGPSVFLFPPKPKDTLMISRTPEVTCVVVAVSHEDPEV |
| | KFNWYVDGVEVHNAKTKPREEQYGSTYRVVSVLTVLHQDWLNGKEYKCKVSNKALPAPIEKTISKAKGQPREPQVYTLPPSREE |
| | MTKNQVSLWCLVKGFYPSDIAVEWESNGQPENNYKTTPPVLDSDGSFFLYSKLTVDKSRWQQGNVFSCSVMHEALHNHYTQKSL |
| | SLSPG |
| 196 | 2Fab-1scDb-AFc-7 Chain2: |
| | QPVLTQPPSVSVAPGKTARITCGGNNIGSKSVHWYQQKPGQAPVLVIYYDSDRPSGIPERFSGSNSGNTATLTISRVEAGDEAD |
| | YYCQVWDTSSDHVLFGGGTKLTVLGQPKAAPSVTLFPPSSEELQANKATLVCLISDFYPGAVTVAWKADSSPVKAGVETTTPSK |
| | QSNNKYAASSYLSLTPEQWKSHRSYSCQVTHEGSTVEKTVAPTECS |
| 197 | 2Fab-1scDb-AFc-7 Chain3: |
| | SYELTQPLSVSVALGQTARITCGGNNIGSKSVHWYQQKPGQAPVLVIYQDKKRPSGIPERFSGSNSGNTATLTISRAQAGDEAD |
| | YYCQVWDDYIVLFGCGTKLTVLGGSGGSQVQLQQSGPELVKPGASVKMSCKASGYTFTDYVINWGKQRSGQGLEWIGEIYPGSG |
| | TNYYNEKFKAKATLTADKSSNIAYMQLSSLTSEDSAVYFCARRGRYGLYAMDYWGQGTSVTVSSGGSGGSGGSGGSGGSGGSDI |
| | QMTQTTSSLSASLGDRVTISCRASQDISNYLNWYQQKPDGTVKLLIYYTSRLHSGVPSRFSGSGSGTDYSLTINNLEQEDIATY |
| | FCQQGNTRPWTFGGGTKLEIKGGSGGSQVQLVQSGAEVKKPGASVKVSCKASGYTFTNYYMQWVRQAPGQCLEWMGIINPSGGV |
| | TSYAQKFQGRVTMTRDTSTSTVYMELSSLRSEDTAVYYCARGSAYYYDFADYWGQGTLVTVSSDKTHTCPPCPAPEFEGGPSVF |
| | LFPPKPKDTLMISRTPEVTCVVVAVSHEDPEVKFNWYVDGVEVHNAKTKPREEQYGSTYRVVSVLTVLHQDWLNGKEYKCKVSN |
| | KALPAPIEKTISKAKGQPREPQVYTLPPSREEMTKNQVSLSCAVKGFYPSDIAVEWESNGQPENNYKTTPPVLDSDGSFFLVSK |
| | LTVDKSRWQQGNVFSCSVMHEALHNHYTQKSLSLSPG |
| 198 | 2Fab-1scDb-AFc-8 Chain1: |
| | EVQLQESGPGLVKPSETLSLTCTVSGGSVSSGSYYWSWIRQPPGKGLEWIGYIYYSGSTNYNPSLKSRVTISVDTSKNQFSLKL |
| | SSVTAADTAVYYCARNPISIPAFDIWGQGTMVTVSSASTKGPSVFPLAPSSKSTSGGTAALGCLVKDYFPEPVTVSWNSGALTS |
| | GVHTFPAVLQSSGLYSLSSVVTVPSSSLGTQTYICNVNHKPSNTKVDKKVEPKSCDKTHTQVQLQESGPGLVKPSETLSLTCTV |
| | SGGSVSSGSYYWSWIRQPPGKGLEWIGYIYYSGSTNYNPSLKSRVTISVDTSKNQFSLKLSSVTAADTAVYYCARNPISIPAFD |
| | IWGQGTMVTVSSASTKGPSVFPLAPSSKSTSGGTAALGCLVKDYFPEPVTVSWNSGALTSGVHTFPAVLQSSGLYSLSSVVTVP |
| | SSSLGTQTYICNVNHKPSNTKVDKKVEPKSCDKTHTCPPCPAPEFEGGPSVFLFPPKPKDTLMISRTPEVTCVVVAVSHEDPEV |
| | KFNWYVDGVEVHNAKTKPREEQYGSTYRVVSVLTVLHQDWLNGKEYKCKVSNKALPAPIEKTISKAKGQPREPQVYTLPPSREE |
| | MTKNQVSLWCLVKGFYPSDIAVEWESNGQPENNYKTTPPVLDSDGSFFLYSKLTVDKSRWQQGNVFSCSVMHEALHNHYTQKSL |
| | SLSPG |
| 199 | 2Fab-1scDb-AFc-8 Chain2: |
| | QPVLTQPPSVSVAPGKTARITCGGNNIGSKSVHWYQQKPGQAPVLVIYYDSDRPSGIPERFSGSNSGNTATLTISRVEAGDEAD |
| | YYCQVWDTSSDHVLFGGGTKLTVLGQPKAAPSVTLFPPSSEELQANKATLVCLISDFYPGAVTVAWKADSSPVKAGVETTTPSK |
| | QSNNKYAASSYLSLTPEQWKSHRSYSCQVTHEGSTVEKTVAPTECS |
| 200 | 2Fab-1scDb-AFc-8 Chain3: |
| | SYELTQPLSVSVALGQTARITCGGNNIGSKSVHWYQQKPGQAPVLVIYQDKKRPSGIPERFSGSNSGNTATLTISRAQAGDEAD |
| | YYCQVWDDYIVLFGCGTKLTVLGGSGGSEVQLQQSGPELVKPGASVKISCKTSGYTFTEYTMHWVKQSHGKSLEWIGGISPNIG |
| | GTSYNQKFKGKATLTVDKSSSTAYMELRSLTSEDSAVYYCARRGGSFDYWGQGTTLTVSSGGSGGSGGSGGSGGSGGSDIVMTQ |
| | SPATLSVTPGDRVSLSCRASQSISDYLHWYQQKSHESPRLLIKYASQSISGIPSRFSGSGSGSDFTLSINSVEPEDVGVYYCQN |
| | GHSFPLTFGAGTKLELKGGSGGSQVQLVQSGAEVKKPGASVKVSCKASGYTFTNYYMQWVRQAPGQCLEWMGIINPSGGVTSYA |
| | QKFQGRVTMTRDTSTSTVYMELSSLRSEDTAVYYCARGSAYYYDFADYWGQGTLVTVSSDKTHTCPPCPAPEFEGGPSVFLFPP |
| | KPKDTLMISRTPEVTCVVVAVSHEDPEVKFNWYVDGVEVHNAKTKPREEQYGSTYRVVSVLTVLHQDWLNGKEYKCKVSNKALP |
| | APIEKTISKAKGQPREPQVYTLPPSREEMTKNQVSLSCAVKGFYPSDIAVEWESNGQPENNYKTTPPVLDSDGSFFLVSKLTVD |
| | KSRWQQGNVFSCSVMHEALHNHYTQKSLSLSPG |
| 201 | 2Fab-1scFv-AFc-1 Chain1: |
| | EVQLVESGGGLVKPGGSLKLSCAASGYTFTSYVMHWVRQAPGKGLEWIGYINPYNDGTKYNEKFQGRVTISSDKSISTAYMELS |
| | SLRSEDTAMYYCARGTYYYGTRVFDYWGQGTLVTVSSASTKGPSVFPLAPSSKSTSGGTAALGCLVKDYFPEPVTVSWNSGALT |
| | SGVHTFPAVLQSSGLYSLSSVVTVPSSSLGTQTYICNVNHKPSNTKVDKKVEPKSCDKTHTEVQLVESGGGLVKPGGSLKLSCA |
| | ASGYTFTSYVMHWVRQAPGKGLEWIGYINPYNDGTKYNEKFQGRVTISSDKSISTAYMELSSLRSEDTAMYYCARGTYYYGTRV |
| | FDYWGQGTLVTVSSASTKGPSVFPLAPSSKSTSGGTAALGCLVKDYFPEPVTVSWNSGALTSGVHTFPAVLQSSGLYSLSSVVT |
| | VPSSSLGTQTYICNVNHKPSNTKVDKKVEPKSCDKTHTCPPCPAPELLGGPSVFLFPPKPKDTLMISRTPEVTCVVVDVSHEDP |
| | EVKFNWYVDGVEVHNAKTKPREEQYNSTYRVVSVLTVLHQDWLNGKEYKCKVSNKALPAPIEKTISKAKGQPREPQVYTLPPSR |
| | EEMTKNQVSLWCLVKGFYPSDIAVEWESNGQPENNYKTTPPVLDSDGSFFLYSKLTVDKSRWQQGNVFSCSVMHEALHNHYTQK |
| | SLSLSPG |
| 202 | 2Fab-1scFv-AFc-1 Chain2: |
| | DIVMTQSPATLSLSPGERATLSCRSSKSLQNVNGNTYLYWFQQKPGQSPQLLIYRMSNLNSGVPDRFSGSGSGTEFTLTISSLE |
| | PEDFAVYYCMQHLEYPITFGAGTKLEIKRTVAAPSVFIFPPSDEQLKSGTASVVCLLNNFYPREAKVQWKVDNALQSGNSQESV |
| | TEQDSKDSTYSLSSTLTLSKADYEKHKVYACEVTHQGLSSPVTKSFNRGEC |
| 203 | 2Fab-1scFv-AFc-1 Chain3: |
| | EVQLVESGGGLVKPGGSLRLSCAASGFTFSSYGMHWVRQAPGKGLEWVAFIRYDGSNKYYADSVKGRFTISRDNSKNTLYLQMN |
| | SLRAEDTAVYYCAKDRGLGDGTYFDYWGQGTTVTVSSGGSGGSGGSGGSGGSGGSQSALTQPASVSGSPGQSITISCSGSSSNI |
| | GNNAVNWYQQLPGKAPKLLIYYDDLLPSGVSDRFSGSKSGTSAFLAISGLQSEDEADYYCAAWDDSLNGPVFGGGTKLTVLDKT |
| | HTCPPCPAPELLGGPSVFLFPPKPKDTLMISRTPEVTCVVVDVSHEDPEVKFNWYVDGVEVHNAKTKPREEQYNSTYRVVSVLT |
| | VLHQDWLNGKEYKCKVSNKALPAPIEKTISKAKGQPREPQVYTLPPSREEMTKNQVSLSCAVKGFYPSDIAVEWESNGQPENNY |
| | KTTPPVLDSDGSFFLVSKLTVDKSRWQQGNVFSCSVMHEALHNHYTQKSLSLSPG |
| 204 | 2Fab-1scFv-AFc-2 Chain1: |
| | EVQLVESGGGLVKPGGSLKLSCAASGYTFTSYVMHWVRQAPGKGLEWIGYINPYNDGTKYNEKFQGRVTISSDKSISTAYMELS |
| | SLRSEDTAMYYCARGTYYYGTRVFDYWGQGTLVTVSSASTKGPSVFPLAPSSKSTSGGTAALGCLVKDYFPEPVTVSWNSGALT |
| | SGVHTFPAVLQSSGLYSLSSVVTVPSSSLGTQTYICNVNHKPSNTKVDKKVEPKSCDKTHTEVQLVESGGGLVKPGGSLKLSCA |
| | ASGYTFTSYVMHWVRQAPGKGLEWIGYINPYNDGTKYNEKFQGRVTISSDKSISTAYMELSSLRSEDTAMYYCARGTYYYGTRV |
| | FDYWGQGTLVTVSSASTKGPSVFPLAPSSKSTSGGTAALGCLVKDYFPEPVTVSWNSGALTSGVHTFPAVLQSSGLYSLSSVVT |
| | VPSSSLGTQTYICNVNHKPSNTKVDKKVEPKSCDKTHTCPPCPAPELLGGPSVFLFPPKPKDTLMISRTPEVTCVVVDVSHEDP |
| | EVKFNWYVDGVEVHNAKTKPREEQYNSTYRVVSVLTVLHQDWLNGKEYKCKVSNKALPAPIEKTISKAKGQPREPQVYTLPPSR |
| | EEMTKNQVSLWCLVKGFYPSDIAVEWESNGQPENNYKTTPPVLDSDGSFFLYSKLTVDKSRWQQGNVFSCSVMHEALHNHYTQK |
| | SLSLSPG |
| 205 | 2Fab-1scFv-AFc-2 Chain2: |
| | DIVMTQSPATLSLSPGERATLSCRSSKSLQNVNGNTYLYWFQQKPGQSPQLLIYRMSNLNSGVPDRFSGSGSGTEFTLTISSLE |
| | PEDFAVYYCMQHLEYPITFGAGTKLEIKRTVAAPSVFIFPPSDEQLKSGTASVVCLLNNFYPREAKVQWKVDNALQSGNSQESV |
| | TEQDSKDSTYSLSSTLTLSKADYEKHKVYACEVTHQGLSSPVTKSFNRGEC |
| 206 | 2Fab-1scFv-AFc-2 Chain3: |
| | EVQLQQWGAGLLKPSETLSLTCAVYGGSFSGYYWSWIRQPPGKGLEWIGEIDHSGSTNYNPSLKSRVTISVDTSKNQFSLKLSS |
| | VTAADTAVYYCARARGPWSFDPWGQGTLVTVSSGGSGGSGGSGGSGGSGGSDIQMTQSPSTLSASVGDRVTITCRASQSISSWL |
| | AWYQQKPGKAPKLLIYKASSLESGVPSRFSGSGSGTEFTLTISSLQPDDFATYYCQQYNSYPTFGGGTKVEIKDKTHTCPPCPA |
| | PELLGGPSVFLFPPKPKDTLMISRTPEVTCVVVDVSHEDPEVKFNWYVDGVEVHNAKTKPREEQYNSTYRVVSVLTVLHQDWLN |
| | GKEYKCKVSNKALPAPIEKTISKAKGQPREPQVYTLPPSREEMTKNQVSLSCAVKGFYPSDIAVEWESNGQPENNYKTTPPVLD |
| | SDGSFFLVSKLTVDKSRWQQGNVFSCSVMHEALHNHYTQKSLSLSPG |
| 207 | 2Fab-1scFv-AFc-3 Chain1: |
| | EVQLVESGGGLVKPGGSLKLSCAASGYTFTSYVMHWVRQAPGKGLEWIGYINPYNDGTKYNEKFQGRVTISSDKSISTAYMELS |
| | SLRSEDTAMYYCARGTYYYGTRVFDYWGQGTLVTVSSASTKGPSVFPLAPSSKSTSGGTAALGCLVKDYFPEPVTVSWNSGALT |
| | SGVHTFPAVLQSSGLYSLSSVVTVPSSSLGTQTYICNVNHKPSNTKVDKKVEPKSCDKTHTEVQLVESGGGLVKPGGSLKLSCA |
| | ASGYTFTSYVMHWVRQAPGKGLEWIGYINPYNDGTKYNEKFQGRVTISSDKSISTAYMELSSLRSEDTAMYYCARGTYYYGTRV |
| | FDYWGQGTLVTVSSASTKGPSVFPLAPSSKSTSGGTAALGCLVKDYFPEPVTVSWNSGALTSGVHTFPAVLQSSGLYSLSSVVT |
| | VPSSSLGTQTYICNVNHKPSNTKVDKKVEPKSCDKTHTCPPCPAPELLGGPSVFLFPPKPKDTLMISRTPEVTCVVVDVSHEDP |
| | EVKFNWYVDGVEVHNAKTKPREEQYNSTYRVVSVLTVLHQDWLNGKEYKCKVSNKALPAPIEKTISKAKGQPREPQVYTLPPSR |
| | EEMTKNQVSLWCLVKGFYPSDIAVEWESNGQPENNYKTTPPVLDSDGSFFLYSKLTVDKSRWQQGNVFSCSVMHEALHNHYTQK |
| | SLSLSPG |
| 208 | 2Fab-1scFv-AFc-3 Chain2: |
| | DIVMTQSPATLSLSPGERATLSCRSSKSLQNVNGNTYLYWFQQKPGQSPQLLIYRMSNLNSGVPDRFSGSGSGTEFTLTISSLE |
| | PEDFAVYYCMQHLEYPITFGAGTKLEIKRTVAAPSVFIFPPSDEQLKSGTASVVCLLNNFYPREAKVQWKVDNALQSGNSQESV |
| | TEQDSKDSTYSLSSTLTLSKADYEKHKVYACEVTHQGLSSPVTKSFNRGEC |
| 209 | 2Fab-1scFv-AFc-3 Chain3: |
| | EVQLQQSGPELVKPGASVKMSCKASGYTFTDYVINWGKQRSGQGLEWIGEIYPGSGTNYYNEKFKAKATLTADKSSNIAYMQLS |
| | SLTSEDSAVYFCARRGRYGLYAMDYWGQGTSVTVSSGGSGGSGGSGGSGGSGGSDIQMTQTTSSLSASLGDRVTISCRASQDIS |
| | NYLNWYQQKPDGTVKLLIYYTSRLHSGVPSRFSGSGSGTDYSLTINNLEQEDIATYFCQQGNTRPWTFGGGTKLEIKDKTHTCP |
| | PCPAPELLGGPSVFLFPPKPKDTLMISRTPEVTCVVVDVSHEDPEVKFNWYVDGVEVHNAKTKPREEQYNSTYRVVSVLTVLHQ |
| | DWLNGKEYKCKVSNKALPAPIEKTISKAKGQPREPQVYTLPPSREEMTKNQVSLSCAVKGFYPSDIAVEWESNGQPENNYKTTP |
| | PVLDSDGSFFLVSKLTVDKSRWQQGNVFSCSVMHEALHNHYTQKSLSLSPG |
| 210 | 2Fab-1scFv-AFc-4 Chain1: |
| | EVQLVESGGGLVKPGGSLKLSCAASGYTFTSYVMHWVRQAPGKGLEWIGYINPYNDGTKYNEKFQGRVTISSDKSISTAYMELS |
| | SLRSEDTAMYYCARGTYYYGTRVFDYWGQGTLVTVSSASTKGPSVFPLAPSSKSTSGGTAALGCLVKDYFPEPVTVSWNSGALT |
| | SGVHTFPAVLQSSGLYSLSSVVTVPSSSLGTQTYICNVNHKPSNTKVDKKVEPKSCDKTHTEVQLVESGGGLVKPGGSLKLSCA |
| | ASGYTFTSYVMHWVRQAPGKGLEWIGYINPYNDGTKYNEKFQGRVTISSDKSISTAYMELSSLRSEDTAMYYCARGTYYYGTRV |
| | FDYWGQGTLVTVSSASTKGPSVFPLAPSSKSTSGGTAALGCLVKDYFPEPVTVSWNSGALTSGVHTFPAVLQSSGLYSLSSVVT |
| | VPSSSLGTQTYICNVNHKPSNTKVDKKVEPKSCDKTHTCPPCPAPELLGGPSVFLFPPKPKDTLMISRTPEVTCVVVDVSHEDP |
| | EVKFNWYVDGVEVHNAKTKPREEQYNSTYRVVSVLTVLHQDWLNGKEYKCKVSNKALPAPIEKTISKAKGQPREPQVYTLPPSR |
| | EEMTKNQVSLWCLVKGFYPSDIAVEWESNGQPENNYKTTPPVLDSDGSFFLYSKLTVDKSRWQQGNVFSCSVMHEALHNHYTQK |
| | SLSLSPG |
| 211 | 2Fab-1scFv-AFc-4 Chain2: |
| | DIVMTQSPATLSLSPGERATLSCRSSKSLQNVNGNTYLYWFQQKPGQSPQLLIYRMSNLNSGVPDRFSGSGSGTEFTLTISSLE |
| | PEDFAVYYCMQHLEYPITFGAGTKLEIKRTVAAPSVFIFPPSDEQLKSGTASVVCLLNNFYPREAKVQWKVDNALQSGNSQESV |
| | TEQDSKDSTYSLSSTLTLSKADYEKHKVYACEVTHQGLSSPVTKSFNRGEC |
| 212 | 2Fab-1scFv-AFc-4 Chain3: |
| | EVQLQQSGPELVKPGASVKISCKTSGYTFTEYTMHWVKQSHGKSLEWIGGISPNIGGTSYNQKFKGKATLTVDKSSSTAYMELR |
| | SLTSEDSAVYYCARRGGSFDYWGQGTTLTVSSGGSGGSGGSGGSGGSGGSDIVMTQSPATLSVTPGDRVSLSCRASQSISDYLH |
| | WYQQKSHESPRLLIKYASQSISGIPSRFSGSGSGSDFTLSINSVEPEDVGVYYCQNGHSFPLTFGAGTKLELKDKTHTCPPCPA |
| | PELLGGPSVFLFPPKPKDTLMISRTPEVTCVVVDVSHEDPEVKFNWYVDGVEVHNAKTKPREEQYNSTYRVVSVLTVLHQDWLN |
| | GKEYKCKVSNKALPAPIEKTISKAKGQPREPQVYTLPPSREEMTKNQVSLSCAVKGFYPSDIAVEWESNGQPENNYKTTPPVLD |
| | SDGSFFLVSKLTVDKSRWQQGNVFSCSVMHEALHNHYTQKSLSLSPG |
| 213 | 2Fab-1scDb-AFc-9 Chain1: |
| | EVQLVESGGGLVKPGGSLKLSCAASGYTFTSYVMHWVRQAPGKGLEWIGYINPYNDGTKYNEKFQGRVTISSDKSISTAYMELS |
| | SLRSEDTAMYYCARGTYYYGTRVFDYWGQGTLVTVSSASTKGPSVFPLAPSSKSTSGGTAALGCLVKDYFPEPVTVSWNSGALT |
| | SGVHTFPAVLQSSGLYSLSSVVTVPSSSLGTQTYICNVNHKPSNTKVDKKVEPKSCDKTHTEVQLVESGGGLVKPGGSLKLSCA |
| | ASGYTFTSYVMHWVRQAPGKGLEWIGYINPYNDGTKYNEKFQGRVTISSDKSISTAYMELSSLRSEDTAMYYCARGTYYYGTRV |
| | FDYWGQGTLVTVSSASTKGPSVFPLAPSSKSTSGGTAALGCLVKDYFPEPVTVSWNSGALTSGVHTFPAVLQSSGLYSLSSVVT |
| | VPSSSLGTQTYICNVNHKPSNTKVDKKVEPKSCDKTHTCPPCPAPEFEGGPSVFLFPPKPKDTLMISRTPEVTCVVVAVSHEDP |
| | EVKFNWYVDGVEVHNAKTKPREEQYGSTYRVVSVLTVLHQDWLNGKEYKCKVSNKALPAPIEKTISKAKGQPREPQVYTLPPSR |
| | EEMTKNQVSLWCLVKGFYPSDIAVEWESNGQPENNYKTTPPVLDSDGSFFLYSKLTVDKSRWQQGNVFSCSVMHEALHNHYTQK |
| | SLSLSPG |
| 214 | 2Fab-1scDb-AFc-9 Chain2: |
| | DIVMTQSPATLSLSPGERATLSCRSSKSLQNVNGNTYLYWFQQKPGQSPQLLIYRMSNLNSGVPDRFSGSGSGTEFTLTISSLE |
| | PEDFAVYYCMQHLEYPITFGAGTKLEIKRTVAAPSVFIFPPSDEQLKSGTASVVCLLNNFYPREAKVQWKVDNALQSGNSQESV |
| | TEQDSKDSTYSLSSTLTLSKADYEKHKVYACEVTHQGLSSPVTKSFNRGEC |
| 215 | 2Fab-1scDb-AFc-9 Chain3: |
| | DIVLTQSPASLAVSLGQRATISCKASQSVDFDGDSFMNWYQQKPGQPPKLLIYTTSNLESGIPARFSASGSGTDFTLNIHPVEE |
| | EDTATYYCQQSNEDPYTFGGGTKLELKGGSGGSQVQLVESGGGLVKPGGSLRLSCAASGFTFSSYGMHWVRQAPGKGLEWVAFI |
| | RYDGSNKYYADSVKGRFTISRDNSKNTLYLQMNSLRAEDTAVYYCAKDRGLGDGTYFDYWGQGTTVTVSSGGSGGSGGSGGSGG |
| | SGGSQSALTQPASVSGSPGQSITISCSGSSSNIGNNAVNWYQQLPGKAPKLLIYYDDLLPSGVSDRFSGSKSGTSAFLAISGLQ |
| | SEDEADYYCAAWDDSLNGPVFGGGTKLTVLGGSGGSQVTLKESGPGILQPSQTLSLTCSFSGFSLRTSGMGVGWIRQPSGKGLE |
| | WLAHIWWDDDKRYNPALKSRLTISKDTSSNQVFLKIASVDTADTATYYCAQINPAWFAYWGQGTLVTVSADKTHTCPPCPAPEF |
| | EGGPSVFLFPPKPKDTLMISRTPEVTCVVVAVSHEDPEVKFNWYVDGVEVHNAKTKPREEQYGSTYRVVSVLTVLHQDWLNGKE |
| | YKCKVSNKALPAPIEKTISKAKGQPREPQVYTLPPSREEMTKNQVSLSCAVKGFYPSDIAVEWESNGQPENNYKTTPPVLDSDG |
| | SFFLVSKLTVDKSRWQQGNVFSCSVMHEALHNHYTQKSLSLSPG |
| 216 | 2Fab-1scDb-AFc-10 Chain1: |
| | EVQLVESGGGLVKPGGSLKLSCAASGYTFTSYVMHWVRQAPGKGLEWIGYINPYNDGTKYNEKFQGRVTISSDKSISTAYMELS |
| | SLRSEDTAMYYCARGTYYYGTRVFDYWGQGTLVTVSSASTKGPSVFPLAPSSKSTSGGTAALGCLVKDYFPEPVTVSWNSGALT |
| | SGVHTFPAVLQSSGLYSLSSVVTVPSSSLGTQTYICNVNHKPSNTKVDKKVEPKSCDKTHTEVQLVESGGGLVKPGGSLKLSCA |
| | ASGYTFTSYVMHWVRQAPGKGLEWIGYINPYNDGTKYNEKFQGRVTISSDKSISTAYMELSSLRSEDTAMYYCARGTYYYGTRV |
| | FDYWGQGTLVTVSSASTKGPSVFPLAPSSKSTSGGTAALGCLVKDYFPEPVTVSWNSGALTSGVHTFPAVLQSSGLYSLSSVVT |
| | VPSSSLGTQTYICNVNHKPSNTKVDKKVEPKSCDKTHTCPPCPAPEFEGGPSVFLFPPKPKDTLMISRTPEVTCVVVAVSHEDP |
| | EVKFNWYVDGVEVHNAKTKPREEQYGSTYRVVSVLTVLHQDWLNGKEYKCKVSNKALPAPIEKTISKAKGQPREPQVYTLPPSR |
| | EEMTKNQVSLWCLVKGFYPSDIAVEWESNGQPENNYKTTPPVLDSDGSFFLYSKLTVDKSRWQQGNVFSCSVMHEALHNHYTQK |
| | SLSLSPG |
| 217 | 2Fab-1scDb-AFc-10 Chain2: |
| | DIVMTQSPATLSLSPGERATLSCRSSKSLQNVNGNTYLYWFQQKPGQSPQLLIYRMSNLNSGVPDRFSGSGSGTEFTLTISSLE |
| | PEDFAVYYCMQHLEYPITFGAGTKLEIKRTVAAPSVFIFPPSDEQLKSGTASVVCLLNNFYPREAKVQWKVDNALQSGNSQESV |
| | TEQDSKDSTYSLSSTLTLSKADYEKHKVYACEVTHQGLSSPVTKSFNRGEC |
| 218 | 2Fab-1scDb-AFc-10 Chain3: |
| | DIVLTQSPASLAVSLGQRATISCKASQSVDFDGDSFMNWYQQKPGQPPKLLIYTTSNLESGIPARFSASGSGTDFTLNIHPVEE |
| | EDTATYYCQQSNEDPYTFGGGTKLELKGGSGGSQVQLQQWGAGLLKPSETLSLTCAVYGGSFSGYYWSWIRQPPGKGLEWIGEI |
| | DHSGSTNYNPSLKSRVTISVDTSKNQFSLKLSSVTAADTAVYYCARARGPWSFDPWGQGTLVTVSSGGSGGSGGSGGSGGSGGS |
| | DIQMTQSPSTLSASVGDRVTITCRASQSISSWLAWYQQKPGKAPKLLIYKASSLESGVPSRFSGSGSGTEFTLTISSLQPDDFA |
| | TYYCQQYNSYPTFGGGTKVEIKGGSGGSQVTLKESGPGILQPSQTLSLTCSFSGFSLRTSGMGVGWIRQPSGKGLEWLAHIWWD |
| | DDKRYNPALKSRLTISKDTSSNQVFLKIASVDTADTATYYCAQINPAWFAYWGQGTLVTVSADKTHTCPPCPAPEFEGGPSVFL |
| | FPPKPKDTLMISRTPEVTCVVVAVSHEDPEVKFNWYVDGVEVHNAKTKPREEQYGSTYRVVSVLTVLHQDWLNGKEYKCKVSNK |
| | ALPAPIEKTISKAKGQPREPQVYTLPPSREEMTKNQVSLSCAVKGFYPSDIAVEWESNGQPENNYKTTPPVLDSDGSFFLVSKL |
| | TVDKSRWQQGNVFSCSVMHEALHNHYTQKSLSLSPG |
| 219 | 2Fab-1scDb-AFc-11 Chain1: |
| | EVQLVESGGGLVKPGGSLKLSCAASGYTFTSYVMHWVRQAPGKGLEWIGYINPYNDGTKYNEKFQGRVTISSDKSISTAYMELS |
| | SLRSEDTAMYYCARGTYYYGTRVFDYWGQGTLVTVSSASTKGPSVFPLAPSSKSTSGGTAALGCLVKDYFPEPVTVSWNSGALT |
| | SGVHTFPAVLQSSGLYSLSSVVTVPSSSLGTQTYICNVNHKPSNTKVDKKVEPKSCDKTHTEVQLVESGGGLVKPGGSLKLSCA |
| | ASGYTFTSYVMHWVRQAPGKGLEWIGYINPYNDGTKYNEKFQGRVTISSDKSISTAYMELSSLRSEDTAMYYCARGTYYYGTRV |
| | FDYWGQGTLVTVSSASTKGPSVFPLAPSSKSTSGGTAALGCLVKDYFPEPVTVSWNSGALTSGVHTFPAVLQSSGLYSLSSVVT |
| | VPSSSLGTQTYICNVNHKPSNTKVDKKVEPKSCDKTHTCPPCPAPEFEGGPSVFLFPPKPKDTLMISRTPEVTCVVVAVSHEDP |
| | EVKFNWYVDGVEVHNAKTKPREEQYGSTYRVVSVLTVLHQDWLNGKEYKCKVSNKALPAPIEKTISKAKGQPREPQVYTLPPSR |
| | EEMTKNQVSLWCLVKGFYPSDIAVEWESNGQPENNYKTTPPVLDSDGSFFLYSKLTVDKSRWQQGNVFSCSVMHEALHNHYTQK |
| | SLSLSPG |
| 220 | 2Fab-1scDb-AFc-11 Chain2: |
| | DIVMTQSPATLSLSPGERATLSCRSSKSLQNVNGNTYLYWFQQKPGQSPQLLIYRMSNLNSGVPDRFSGSGSGTEFTLTISSLE |
| | PEDFAVYYCMQHLEYPITFGAGTKLEIKRTVAAPSVFIFPPSDEQLKSGTASVVCLLNNFYPREAKVQWKVDNALQSGNSQESV |
| | TEQDSKDSTYSLSSTLTLSKADYEKHKVYACEVTHQGLSSPVTKSFNRGEC |
| 221 | 2Fab-1scDb-AFc-11 Chain3: |
| | DIVLTQSPASLAVSLGQRATISCKASQSVDFDGDSFMNWYQQKPGQPPKLLIYTTSNLESGIPARFSASGSGTDFTLNIHPVEE |
| | EDTATYYCQQSNEDPYTFGGGTKLELKGGSGGSQVQLQQSGPELVKPGASVKMSCKASGYTFTDYVINWGKQRSGQGLEWIGEI |
| | YPGSGTNYYNEKFKAKATLTADKSSNIAYMQLSSLTSEDSAVYFCARRGRYGLYAMDYWGQGTSVTVSSGGSGGSGGSGGSGGS |
| | GGSDIQMTQTTSSLSASLGDRVTISCRASQDISNYLNWYQQKPDGTVKLLIYYTSRLHSGVPSRFSGSGSGTDYSLTINNLEQE |
| | DIATYFCQQGNTRPWTFGGGTKLEIKGGSGGSQVTLKESGPGILQPSQTLSLTCSFSGFSLRTSGMGVGWIRQPSGKGLEWLAH |
| | IWWDDDKRYNPALKSRLTISKDTSSNQVFLKIASVDTADTATYYCAQINPAWFAYWGQGTLVTVSADKTHTCPPCPAPEFEGGP |
| | SVFLFPPKPKDTLMISRTPEVTCVVVAVSHEDPEVKFNWYVDGVEVHNAKTKPREEQYGSTYRVVSVLTVLHQDWLNGKEYKCK |
| | VSNKALPAPIEKTISKAKGQPREPQVYTLPPSREEMTKNQVSLSCAVKGFYPSDIAVEWESNGQPENNYKTTPPVLDSDGSFFL |
| | VSKLTVDKSRWQQGNVFSCSVMHEALHNHYTQKSLSLSPG |
| 222 | 2Fab-1scDb-AFc-12 Chain1: |
| | EVQLVESGGGLVKPGGSLKLSCAASGYTFTSYVMHWVRQAPGKGLEWIGYINPYNDGTKYNEKFQGRVTISSDKSISTAYMELS |
| | SLRSEDTAMYYCARGTYYYGTRVFDYWGQGTLVTVSSASTKGPSVFPLAPSSKSTSGGTAALGCLVKDYFPEPVTVSWNSGALT |
| | SGVHTFPAVLQSSGLYSLSSVVTVPSSSLGTQTYICNVNHKPSNTKVDKKVEPKSCDKTHTEVQLVESGGGLVKPGGSLKLSCA |
| | ASGYTFTSYVMHWVRQAPGKGLEWIGYINPYNDGTKYNEKFQGRVTISSDKSISTAYMELSSLRSEDTAMYYCARGTYYYGTRV |
| | FDYWGQGTLVTVSSASTKGPSVFPLAPSSKSTSGGTAALGCLVKDYFPEPVTVSWNSGALTSGVHTFPAVLQSSGLYSLSSVVT |
| | VPSSSLGTQTYICNVNHKPSNTKVDKKVEPKSCDKTHTCPPCPAPEFEGGPSVFLFPPKPKDTLMISRTPEVTCVVVAVSHEDP |
| | EVKFNWYVDGVEVHNAKTKPREEQYGSTYRVVSVLTVLHQDWLNGKEYKCKVSNKALPAPIEKTISKAKGQPREPQVYTLPPSR |
| | EEMTKNQVSLWCLVKGFYPSDIAVEWESNGQPENNYKTTPPVLDSDGSFFLYSKLTVDKSRWQQGNVFSCSVMHEALHNHYTQK |
| | SLSLSPG |
| 223 | 2Fab-1scDb-AFc-12 Chain2: |
| | DIVMTQSPATLSLSPGERATLSCRSSKSLQNVNGNTYLYWFQQKPGQSPQLLIYRMSNLNSGVPDRFSGSGSGTEFTLTISSLE |
| | PEDFAVYYCMQHLEYPITFGAGTKLEIKRTVAAPSVFIFPPSDEQLKSGTASVVCLLNNFYPREAKVQWKVDNALQSGNSQESV |
| | TEQDSKDSTYSLSSTLTLSKADYEKHKVYACEVTHQGLSSPVTKSFNRGEC |
| 224 | 2Fab-1scDb-AFc-12 Chain3: |
| | DIVLTQSPASLAVSLGQRATISCKASQSVDFDGDSFMNWYQQKPGQPPKLLIYTTSNLESGIPARFSASGSGTDFTLNIHPVEE |
| | EDTATYYCQQSNEDPYTFGGGTKLELKGGSGGSEVQLQQSGPELVKPGASVKISCKTSGYTFTEYTMHWVKQSHGKSLEWIGGI |
| | SPNIGGTSYNQKFKGKATLTVDKSSSTAYMELRSLTSEDSAVYYCARRGGSFDYWGQGTTLTVSSGGSGGSGGSGGSGGSGGSD |
| | IVMTQSPATLSVTPGDRVSLSCRASQSISDYLHWYQQKSHESPRLLIKYASQSISGIPSRFSGSGSGSDFTLSINSVEPEDVGV |
| | YYCQNGHSFPLTFGAGTKLELKGGSGGSQVTLKESGPGILQPSQTLSLTCSFSGFSLRTSGMGVGWIRQPSGKGLEWLAHIWWD |
| | DDKRYNPALKSRLTISKDTSSNQVFLKIASVDTADTATYYCAQINPAWFAYWGQGTLVTVSADKTHTCPPCPAPEFEGGPSVFL |
| | FPPKPKDTLMISRTPEVTCVVVAVSHEDPEVKFNWYVDGVEVHNAKTKPREEQYGSTYRVVSVLTVLHQDWLNGKEYKCKVSNK |
| | ALPAPIEKTISKAKGQPREPQVYTLPPSREEMTKNQVSLSCAVKGFYPSDIAVEWESNGQPENNYKTTPPVLDSDGSFFLVSKL |
| | TVDKSRWQQGNVFSCSVMHEALHNHYTQKSLSLSPG |
| 225 | 1Fab-1scDb-AFc-1 Chain1: |
| | EVQLVESGGGLVKPGGSLKLSCAASGYTFTSYVMHWVRQAPGKGLEWIGYINPYNDGTKYNEKFQGRVTISSDKSISTAYMELS |
| | SLRSEDTAMYYCARGTYYYGTRVFDYWGQGTLVTVSSASTKGPSVFPLAPSSKSTSGGTAALGCLVKDYFPEPVTVSWNSGALT |
| | SGVHTFPAVLQSSGLYSLSSVVTVPSSSLGTQTYICNVNHKPSNTKVDKKVEPKSCDKTHTCPPCPAPEFEGGPSVFLFPPKPK |
| | DTLMISRTPEVTCVVVAVSHEDPEVKFNWYVDGVEVHNAKTKPREEQYGSTYRVVSVLTVLHQDWLNGKEYKCKVSNKALPAPI |
| | EKTISKAKGQPREPQVYTLPPSREEMTKNQVSLWCLVKGFYPSDIAVEWESNGQPENNYKTTPPVLDSDGSFFLYSKLTVDKSR |
| | WQQGNVFSCSVMHEALHNHYTQKSLSLSPG |
| 226 | 1Fab-1scDb-AFc-1 Chain2: |
| | DIVMTQSPATLSLSPGERATLSCRSSKSLQNVNGNTYLYWFQQKPGQSPQLLIYRMSNLNSGVPDRFSGSGSGTEFTLTISSLE |
| | PEDFAVYYCMQHLEYPITFGAGTKLEIKRTVAAPSVFIFPPSDEQLKSGTASVVCLLNNFYPREAKVQWKVDNALQSGNSQESV |
| | TEQDSKDSTYSLSSTLTLSKADYEKHKVYACEVTHQGLSSPVTKSFNRGEC |
| 227 | 1Fab-1scDb-AFc-1 Chain3: |
| | SYELTQPLSVSVALGQTARITCGGNNIGSKSVHWYQQKPGQAPVLVIYQDKKRPSGIPERFSGSNSGNTATLTISRAQAGDEAD |
| | YYCQVWDDYIVLFGCGTKLTVLGGSGGSQVQLVESGGGLVKPGGSLRLSCAASGFTFSSYGMHWVRQAPGKGLEWVAFIRYDGS |
| | NKYYADSVKGRFTISRDNSKNTLYLQMNSLRAEDTAVYYCAKDRGLGDGTYFDYWGQGTTVTVSSGGSGGSGGSGGSGGSGGSQ |
| | SALTQPASVSGSPGQSITISCSGSSSNIGNNAVNWYQQLPGKAPKLLIYYDDLLPSGVSDRFSGSKSGTSAFLAISGLQSEDEA |
| | DYYCAAWDDSLNGPVFGGGTKLTVLGGSGGSQVQLVQSGAEVKKPGASVKVSCKASGYTFTNYYMQWVRQAPGQCLEWMGIINP |
| | SGGVTSYAQKFQGRVTMTRDTSTSTVYMELSSLRSEDTAVYYCARGSAYYYDFADYWGQGTLVTVSSDKTHTCPPCPAPEFEGG |
| | PSVFLFPPKPKDTLMISRTPEVTCVVVAVSHEDPEVKFNWYVDGVEVHNAKTKPREEQYGSTYRVVSVLTVLHQDWLNGKEYKC |
| | KVSNKALPAPIEKTISKAKGQPREPQVYTLPPSREEMTKNQVSLSCAVKGFYPSDIAVEWESNGQPENNYKTTPPVLDSDGSFF |
| | LVSKLTVDKSRWQQGNVFSCSVMHEALHNHYTQKSLSLSPG |
| 228 | 1Fab-1scDb-AFc-2 Chain1: |
| | EVQLVESGGGLVKPGGSLKLSCAASGYTFTSYVMHWVRQAPGKGLEWIGYINPYNDGTKYNEKFQGRVTISSDKSISTAYMELS |
| | SLRSEDTAMYYCARGTYYYGTRVFDYWGQGTLVTVSSASTKGPSVFPLAPSSKSTSGGTAALGCLVKDYFPEPVTVSWNSGALT |
| | SGVHTFPAVLQSSGLYSLSSVVTVPSSSLGTQTYICNVNHKPSNTKVDKKVEPKSCDKTHTCPPCPAPEFEGGPSVFLFPPKPK |
| | DTLMISRTPEVTCVVVAVSHEDPEVKFNWYVDGVEVHNAKTKPREEQYGSTYRVVSVLTVLHQDWLNGKEYKCKVSNKALPAPI |
| | EKTISKAKGQPREPQVYTLPPSREEMTKNQVSLWCLVKGFYPSDIAVEWESNGQPENNYKTTPPVLDSDGSFFLYSKLTVDKSR |
| | WQQGNVFSCSVMHEALHNHYTQKSLSLSPG |
| 229 | 1Fab-1scDb-AFc-2 Chain2: |
| | DIVMTQSPATLSLSPGERATLSCRSSKSLQNVNGNTYLYWFQQKPGQSPQLLIYRMSNLNSGVPDRFSGSGSGTEFTLTISSLE |
| | PEDFAVYYCMQHLEYPITFGAGTKLEIKRTVAAPSVFIFPPSDEQLKSGTASVVCLLNNFYPREAKVQWKVDNALQSGNSQESV |
| | TEQDSKDSTYSLSSTLTLSKADYEKHKVYACEVTHQGLSSPVTKSFNRGEC |
| 230 | 1Fab-1scDb-AFc-2 Chain3: |
| | SYELTQPLSVSVALGQTARITCGGNNIGSKSVHWYQQKPGQAPVLVIYQDKKRPSGIPERFSGSNSGNTATLTISRAQAGDEAD |
| | YYCQVWDDYIVLFGCGTKLTVLGGSGGSQVQLQQWGAGLLKPSETLSLTCAVYGGSFSGYYWSWIRQPPGKGLEWIGEIDHSGS |
| | TNYNPSLKSRVTISVDTSKNQFSLKLSSVTAADTAVYYCARARGPWSFDPWGQGTLVTVSSGGSGGSGGSGGSGGSGGSDIQMT |
| | QSPSTLSASVGDRVTITCRASQSISSWLAWYQQKPGKAPKLLIYKASSLESGVPSRFSGSGSGTEFTLTISSLQPDDFATYYCQ |
| | QYNSYPTFGGGTKVEIKGGSGGSQVQLVQSGAEVKKPGASVKVSCKASGYTFTNYYMQWVRQAPGQCLEWMGIINPSGGVTSYA |
| | QKFQGRVTMTRDTSTSTVYMELSSLRSEDTAVYYCARGSAYYYDFADYWGQGTLVTVSSDKTHTCPPCPAPEFEGGPSVFLFPP |
| | KPKDTLMISRTPEVTCVVVAVSHEDPEVKFNWYVDGVEVHNAKTKPREEQYGSTYRVVSVLTVLHQDWLNGKEYKCKVSNKALP |
| | APIEKTISKAKGQPREPQVYTLPPSREEMTKNQVSLSCAVKGFYPSDIAVEWESNGQPENNYKTTPPVLDSDGSFFLVSKLTVD |
| | KSRWQQGNVFSCSVMHEALHNHYTQKSLSLSPG |
| 231 | 1Fab-1scDb-AFc-3 Chain1: |
| | EVQLVESGGGLVKPGGSLKLSCAASGYTFTSYVMHWVRQAPGKGLEWIGYINPYNDGTKYNEKFQGRVTISSDKSISTAYMELS |
| | SLRSEDTAMYYCARGTYYYGTRVFDYWGQGTLVTVSSASTKGPSVFPLAPSSKSTSGGTAALGCLVKDYFPEPVTVSWNSGALT |
| | SGVHTFPAVLQSSGLYSLSSVVTVPSSSLGTQTYICNVNHKPSNTKVDKKVEPKSCDKTHTCPPCPAPEFEGGPSVFLFPPKPK |
| | DTLMISRTPEVTCVVVAVSHEDPEVKFNWYVDGVEVHNAKTKPREEQYGSTYRVVSVLTVLHQDWLNGKEYKCKVSNKALPAPI |
| | EKTISKAKGQPREPQVYTLPPSREEMTKNQVSLWCLVKGFYPSDIAVEWESNGQPENNYKTTPPVLDSDGSFFLYSKLTVDKSR |
| | WQQGNVFSCSVMHEALHNHYTQKSLSLSPG |
| 232 | 1Fab-1scDb-AFc-3 Chain2: |
| | DIVMTQSPATLSLSPGERATLSCRSSKSLQNVNGNTYLYWFQQKPGQSPQLLIYRMSNLNSGVPDRFSGSGSGTEFTLTISSLE |
| | PEDFAVYYCMQHLEYPITFGAGTKLEIKRTVAAPSVFIFPPSDEQLKSGTASVVCLLNNFYPREAKVQWKVDNALQSGNSQESV |
| | TEQDSKDSTYSLSSTLTLSKADYEKHKVYACEVTHQGLSSPVTKSFNRGEC |
| 233 | 1Fab-1scDb-AFc-3 Chain3: |
| | SYELTQPLSVSVALGQTARITCGGNNIGSKSVHWYQQKPGQAPVLVIYQDKKRPSGIPERFSGSNSGNTATLTISRAçAGDEAD |
| | YYCQVWDDYIVLFGCGTKLTVLGGSGGSQVQLQQSGPELVKPGASVKMSCKASGYTFTDYVINWGKQRSGQGLEWIGEIYPGSG |
| | TNYYNEKFKAKATLTADKSSNIAYMQLSSLTSEDSAVYFCARRGRYGLYAMDYWGQGTSVTVSSGGSGGSGGSGGSGGSGGSDI |
| | QMTQTTSSLSASLGDRVTISCRASQDISNYLNWYQQKPDGTVKLLIYYTSRLHSGVPSRFSGSGSGTDYSLTINNLEQEDIATY |
| | FCQQGNTRPWTFGGGTKLEIKGGSGGSQVQLVQSGAEVKKPGASVKVSCKASGYTFTNYYMQWVRQAPGQCLEWMGIINPSGGV |
| | TSYAQKFQGRVTMTRDTSTSTVYMELSSLRSEDTAVYYCARGSAYYYDFADYWGQGTLVTVSSDKTHTCPPCPAPEFEGGPSVF |
| | LFPPKPKDTLMISRTPEVTCVVVAVSHEDPEVKFNWYVDGVEVHNAKTKPREEQYGSTYRVVSVLTVLHQDWLNGKEYKCKVSN |
| | KALPAPIEKTISKAKGQPREPQVYTLPPSREEMTKNQVSLSCAVKGFYPSDIAVEWESNGQPENNYKTTPPVLDSDGSFFLVSK |
| | LTVDKSRWQQGNVFSCSVMHEALHNHYTQKSLSLSPG |
| 234 | 1Fab-1scDb-AFc-4 Chain1: |
| | EVQLVESGGGLVKPGGSLKLSCAASGYTFTSYVMHWVRQAPGKGLEWIGYINPYNDGTKYNEKFQGRVTISSDKSISTAYMELS |
| | SLRSEDTAMYYCARGTYYYGTRVFDYWGQGTLVTVSSASTKGPSVFPLAPSSKSTSGGTAALGCLVKDYFPEPVTVSWNSGALT |
| | SGVHTFPAVLQSSGLYSLSSVVTVPSSSLGTQTYICNVNHKPSNTKVDKKVEPKSCDKTHTCPPCPAPEFEGGPSVFLFPPKPK |
| | DTLMISRTPEVTCVVVAVSHEDPEVKFNWYVDGVEVHNAKTKPREEQYGSTYRVVSVLTVLHQDWLNGKEYKCKVSNKALPAPI |
| | EKTISKAKGQPREPQVYTLPPSREEMTKNQVSLWCLVKGFYPSDIAVEWESNGQPENNYKTTPPVLDSDGSFFLYSKLTVDKSR |
| | WQQGNVFSCSVMHEALHNHYTQKSLSLSPG |
| 235 | 1 Fab-1scDb-AFc-4 Chain2: |
| | DIVMTQSPATLSLSPGERATLSCRSSKSLQNVNGNTYLYWFQQKPGQSPQLLIYRMSNLNSGVPDRFSGSGSGTEFTLTISSLE |
| | PEDFAVYYCMQHLEYPITFGAGTKLEIKRTVAAPSVFIFPPSDEQLKSGTASVVCLLNNFYPREAKVQWKVDNALQSGNSQESV |
| | TEQDSKDSTYSLSSTLTLSKADYEKHKVYACEVTHQGLSSPVTKSFNRGEC |
| 236 | 1Fab-1scDb-AFc-4 Chain3: |
| | SYELTQPLSVSVALGQTARITCGGNNIGSKSVHWYQQKPGQAPVLVIYQDKKRPSGIPERFSGSNSGNTATLTISRAQAGDEAD |
| | YYCQVWDDYIVLFGCGTKLTVLGGSGGSEVQLQQSGPELVKPGASVKISCKTSGYTFTEYTMHWVKQSHGKSLEWIGGISPNIG |
| | GTSYNQKFKGKATLTVDKSSSTAYMELRSLTSEDSAVYYCARRGGSFDYWGQGTTLTVSSGGSGGSGGSGGSGGSGGSDIVMTQ |
| | SPATLSVTPGDRVSLSCRASQSISDYLHWYQQKSHESPRLLIKYASQSISGIPSRFSGSGSGSDFTLSINSVEPEDVGVYYCQN |
| | GHSFPLTFGAGTKLELKGGSGGSQVQLVQSGAEVKKPGASVKVSCKASGYTFTNYYMQWVRQAPGQCLEWMGIINPSGGVTSYA |
| | QKFQGRVTMTRDTSTSTVYMELSSLRSEDTAVYYCARGSAYYYDFADYWGQGTLVTVSSDKTHTCPPCPAPEFEGGPSVFLFPP |
| | KPKDTLMISRTPEVTCVVVAVSHEDPEVKFNWYVDGVEVHNAKTKPREEQYGSTYRVVSVLTVLHQDWLNGKEYKCKVSNKALP |
| | APIEKTISKAKGQPREPQVYTLPPSREEMTKNQVSLSCAVKGFYPSDIAVEWESNGQPENNYKTTPPVLDSDGSFFLVSKLTVD |
| | KSRWQQGNVFSCSVMHEALHNHYTQKSLSLSPG |
| 237 | 2scDb-AFc-1 Chain1: |
| | EVQLVESGGGLVKPGGSLRLSCAASGFTFSSYGMHWVRQAPGKGLEWVAFIRYDGSNKYYADSVKGRFTISRDNSKNTLYLQMN |
| | SLRAEDTAVYYCAKDRGLGDGTYFDYWGQGTTVTVSSGGSGGSGGSDIVMTQSPATLSLSPGERATLSCRSSKSLQNVNGNTYL |
| | YWFQQKPGQSPQLLIYRMSNLNSGVPDRFSGSGSGTEFTLTISSLEPEDFAVYYCMQHLEYPITFGAGTKLEIKGGSGGSGGSG |
| | GSGGSGGSGGSEVQLVESGGGLVKPGGSLKLSCAASGYTFTSYVMHWVRQAPGKGLEWIGYINPYNDGTKYNEKFQGRVTISSD |
| | KSISTAYMELSSLRSEDTAMYYCARGTYYYGTRVFDYWGQGTLVTVSSGGSGGSGGSQSALTQPASVSGSPGQSITISCSGSSS |
| | NIGNNAVNWYQQLPGKAPKLLIYYDDLLPSGVSDRFSGSKSGTSAFLAISGLQSEDEADYYCAAWDDSLNGPVFGGGTKLTVLD |
| | KTHTCPPCPAPEFEGGPSVFLFPPKPKDTLMISRTPEVTCVVVAVSHEDPEVKFNWYVDGVEVHNAKTKPREEQYGSTYRVVSV |
| | LTVLHQDWLNGKEYKCKVSNKALPAPIEKTISKAKGQPREPQVYTLPPSREEMTKNQVSLWCLVKGFYPSDIAVEWESNGQPEN |
| | NYKTTPPVLDSDGSFFLYSKLTVDKSRWQQGNVFSCSVMHEALHNHYTQKSLSLSPG |
| 238 | 2scDb-AFc-1 Chain2: |
| | EVQLVQSGAEVKKPGASVKVSCKASGYTFTNYYMQWVRQAPGQCLEWMGIINPSGGVTSYAQKFQGRVTMTRDTSTSTVYMELS |
| | SLRSEDTAVYYCARGSAYYYDFADYWGQGTLVTVSSGGSGGSGGSDIVMTQSPATLSLSPGERATLSCRSSKSLQNVNGNTYLY |
| | WFQQKPGQSPQLLIYRMSNLNSGVPDRFSGSGSGTEFTLTISSLEPEDFAVYYCMQHLEYPITFGAGTKLEIKGGSGGSGGSGG |
| | SGGSGGSGGSEVQLVESGGGLVKPGGSLKLSCAASGYTFTSYVMHWVRQAPGKGLEWIGYINPYNDGTKYNEKFQGRVTISSDK |
| | SISTAYMELSSLRSEDTAMYYCARGTYYYGTRVFDYWGQGTLVTVSSGGSGGSGGSSYELTQPLSVSVALGQTARITCGGNNIG |
| | SKSVHWYQQKPGQAPVLVIYQDKKRPSGIPERFSGSNSGNTATLTISRAQAGDEADYYCQVWDDYIVLFGCGTKLTVLDKTHTC |
| | PPCPAPEFEGGPSVFLFPPKPKDTLMISRTPEVTCVVVAVSHEDPEVKFNWYVDGVEVHNAKTKPREEQYGSTYRVVSVLTVLH |
| | QDWLNGKEYKCKVSNKALPAPIEKTISKAKGQPREPQVYTLPPSREEMTKNQVSLSCAVKGFYPSDIAVEWESNGQPENNYKTT |
| | PPVLDSDGSFFLVSKLTVDKSRWQQGNVFSCSVMHEALHNHYTQKSLSLSPG |
| 239 | 2scDb-AFc-2 Chain1: |
| | EVQLQQWGAGLLKPSETLSLTCAVYGGSFSGYYWSWIRQPPGKGLEWIGEIDHSGSTNYNPSLKSRVTISVDTSKNQFSLKLSS |
| | VTAADTAVYYCARARGPWSFDPWGQGTLVTVSSGGSGGSGGSDIVMTQSPATLSLSPGERATLSCRSSKSLQNVNGNTYLYWFQ |
| | QKPGQSPQLLIYRMSNLNSGVPDRFSGSGSGTEFTLTISSLEPEDFAVYYCMQHLEYPITFGAGTKLEIKGGSGGSGGSGGSGG |
| | SGGSGGSEVQLVESGGGLVKPGGSLKLSCAASGYTFTSYVMHWVRQAPGKGLEWIGYINPYNDGTKYNEKFQGRVTISSDKSIS |
| | TAYMELSSLRSEDTAMYYCARGTYYYGTRVFDYWGQGTLVTVSSGGSGGSGGSDIQMTQSPSTLSASVGDRVTITCRASQSISS |
| | WLAWYQQKPGKAPKLLIYKASSLESGVPSRFSGSGSGTEFTLTISSLQPDDFATYYCQQYNSYPTFGGGTKVEIKDKTHTCPPC |
| | PAPEFEGGPSVFLFPPKPKDTLMISRTPEVTCVVVAVSHEDPEVKFNWYVDGVEVHNAKTKPREEQYGSTYRVVSVLTVLHQDW |
| | LNGKEYKCKVSNKALPAPIEKTISKAKGQPREPQVYTLPPSREEMTKNQVSLWCLVKGFYPSDIAVEWESNGQPENNYKTTPPV |
| | LDSDGSFFLYSKLTVDKSRWQQGNVFSCSVMHEALHNHYTQKSLSLSPG |
| 240 | 2scDb-AFc-2 Chain2: |
| | EVQLVQSGAEVKKPGASVKVSCKASGYTFTNYYMQWVRQAPGQCLEWMGIINPSGGVTSYAQKFQGRVTMTRDTSTSTVYMELS |
| | SLRSEDTAVYYCARGSAYYYDFADYWGQGTLVTVSSGGSGGSGGSDIVMTQSPATLSLSPGERATLSCRSSKSLQNVNGNTYLY |
| | WFQQKPGQSPQLLIYRMSNLNSGVPDRFSGSGSGTEFTLTISSLEPEDFAVYYCMQHLEYPITFGAGTKLEIKGGSGGSGGSGG |
| | SGGSGGSGGSEVQLVESGGGLVKPGGSLKLSCAASGYTFTSYVMHWVRQAPGKGLEWIGYINPYNDGTKYNEKFQGRVTISSDK |
| | SISTAYMELSSLRSEDTAMYYCARGTYYYGTRVFDYWGQGTLVTVSSGGSGGSGGSSYELTQPLSVSVALGQTARITCGGNNIG |
| | SKSVHWYQQKPGQAPVLVIYQDKKRPSGIPERFSGSNSGNTATLTISRAQAGDEADYYCQVWDDYIVLFGCGTKLTVLDKTHTC |
| | PPCPAPEFEGGPSVFLFPPKPKDTLMISRTPEVTCVVVAVSHEDPEVKFNWYVDGVEVHNAKTKPREEQYGSTYRVVSVLTVLH |
| | QDWLNGKEYKCKVSNKALPAPIEKTISKAKGQPREPQVYTLPPSREEMTKNQVSLSCAVKGFYPSDIAVEWESNGQPENNYKTT |
| | PPVLDSDGSFFLVSKLTVDKSRWQQGNVFSCSVMHEALHNHYTQKSLSLSPG |
| 241 | 2scDb-AFc-3 Chain1: |
| | EVQLQQSGPELVKPGASVKMSCKASGYTFTDYVINWGKQRSGQGLEWIGEIYPGSGTNYYNEKFKAKATLTADKSSNIAYMQLS |
| | SLTSEDSAVYFCARRGRYGLYAMDYWGQGTSVTVSSGGSGGSGGSDIVMTQSPATLSLSPGERATLSCRSSKSLQNVNGNTYLY |
| | WFQQKPGQSPQLLIYRMSNLNSGVPDRFSGSGSGTEFTLTISSLEPEDFAVYYCMQHLEYPITFGAGTKLEIKGGSGGSGGSGG |
| | SGGSGGSGGSEVQLVESGGGLVKPGGSLKLSCAASGYTFTSYVMHWVRQAPGKGLEWIGYINPYNDGTKYNEKFQGRVTISSDK |
| | SISTAYMELSSLRSEDTAMYYCARGTYYYGTRVFDYWGQGTLVTVSSGGSGGSGGSDIQMTQTTSSLSASLGDRVTISCRASQD |
| | ISNYLNWYQQKPDGTVKLLIYYTSRLHSGVPSRFSGSGSGTDYSLTINNLEQEDIATYFCQQGNTRPWTFGGGTKLEIKDKTHT |
| | CPPCPAPEFEGGPSVFLFPPKPKDTLMISRTPEVTCVVVAVSHEDPEVKFNWYVDGVEVHNAKTKPREEQYGSTYRVVSVLTVL |
| | HQDWLNGKEYKCKVSNKALPAPIEKTISKAKGQPREPQVYTLPPSREEMTKNQVSLWCLVKGFYPSDIAVEWESNGQPENNYKT |
| | TPPVLDSDGSFFLYSKLTVDKSRWQQGNVFSCSVMHEALHNHYTQKSLSLSPG |
| 242 | 2scDb-AFc-3 Chain2: |
| | EVQLVQSGAEVKKPGASVKVSCKASGYTFTNYYMQWVRQAPGQCLEWMGIINPSGGVTSYAQKFQGRVTMTRDTSTSTVYMELS |
| | SLRSEDTAVYYCARGSAYYYDFADYWGQGTLVTVSSGGSGGSGGSDIVMTQSPATLSLSPGERATLSCRSSKSLQNVNGNTYLY |
| | WFQQKPGQSPQLLIYRMSNLNSGVPDRFSGSGSGTEFTLTISSLEPEDFAVYYCMQHLEYPITFGAGTKLEIKGGSGGSGGSGG |
| | SGGSGGSGGSEVQLVESGGGLVKPGGSLKLSCAASGYTFTSYVMHWVRQAPGKGLEWIGYINPYNDGTKYNEKFQGRVTISSDK |
| | SISTAYMELSSLRSEDTAMYYCARGTYYYGTRVFDYWGQGTLVTVSSGGSGGSGGSSYELTQPLSVSVALGQTARITCGGNNIG |
| | SKSVHWYQQKPGQAPVLVIYQDKKRPSGIPERFSGSNSGNTATLTISRAQAGDEADYYCQVWDDYIVLFGCGTKLTVLDKTHTC |
| | PPCPAPEFEGGPSVFLFPPKPKDTLMISRTPEVTCVVVAVSHEDPEVKFNWYVDGVEVHNAKTKPREEQYGSTYRVVSVLTVLH |
| | QDWLNGKEYKCKVSNKALPAPIEKTISKAKGQPREPQVYTLPPSREEMTKNQVSLSCAVKGFYPSDIAVEWESNGQPENNYKTT |
| | PPVLDSDGSFFLVSKLTVDKSRWQQGNVFSCSVMHEALHNHYTQKSLSLSPG |
| 243 | 2scDb-AFc-4 Chain1: |
| | EVQLQQSGPELVKPGASVKISCKTSGYTFTEYTMHWVKQSHGKSLEWIGGISPNIGGTSYNQKFKGKATLTVDKSSSTAYMELR |
| | SLTSEDSAVYYCARRGGSFDYWGQGTTLTVSSGGSGGSGGSDIVMTQSPATLSLSPGERATLSCRSSKSLQNVNGNTYLYWFQQ |
| | KPGQSPQLLIYRMSNLNSGVPDRFSGSGSGTEFTLTISSLEPEDFAVYYCMQHLEYPITFGAGTKLEIKGGSGGSGGSGGSGGS |
| | GGSGGSEVQLVESGGGLVKPGGSLKLSCAASGYTFTSYVMHWVRQAPGKGLEWIGYINPYNDGTKYNEKFQGRVTISSDKSIST |
| | AYMELSSLRSEDTAMYYCARGTYYYGTRVFDYWGQGTLVTVSSGGSGGSGGSDIVMTQSPATLSVTPGDRVSLSCRASQSISDY |
| | LHWYQQKSHESPRLLIKYASQSISGIPSRFSGSGSGSDFTLSINSVEPEDVGVYYCQNGHSFPLTFGAGTKLELKDKTHTCPPC |
| | PAPEFEGGPSVFLFPPKPKDTLMISRTPEVTCVVVAVSHEDPEVKFNWYVDGVEVHNAKTKPREEQYGSTYRVVSVLTVLHQDW |
| | LNGKEYKCKVSNKALPAPIEKTISKAKGQPREPQVYTLPPSREEMTKNQVSLWCLVKGFYPSDIAVEWESNGQPENNYKTTPPV |
| | LDSDGSFFLYSKLTVDKSRWQQGNVFSCSVMHEALHNHYTQKSLSLSPG |
| 244 | 2scDb-AFc-4 Chain2: |
| | EVQLVQSGAEVKKPGASVKVSCKASGYTFTNYYMQWVRQAPGQCLEWMGIINPSGGVTSYAQKFQGRVTMTRDTSTSTVYMELS |
| | SLRSEDTAVYYCARGSAYYYDFADYWGQGTLVTVSSGGSGGSGGSDIVMTQSPATLSLSPGERATLSCRSSKSLQNVNGNTYLY |
| | WFQQKPGQSPQLLIYRMSNLNSGVPDRFSGSGSGTEFTLTISSLEPEDFAVYYCMQHLEYPITFGAGTKLEIKGGSGGSGGSGG |
| | SGGSGGSGGSEVQLVESGGGLVKPGGSLKLSCAASGYTFTSYVMHWVRQAPGKGLEWIGYINPYNDGTKYNEKFQGRVTISSDK |
| | SISTAYMELSSLRSEDTAMYYCARGTYYYGTRVFDYWGQGTLVTVSSGGSGGSGGSSYELTQPLSVSVALGQTARITCGGNNIG |
| | SKSVHWYQQKPGQAPVLVIYQDKKRPSGIPERFSGSNSGNTATLTISRAQAGDEADYYCQVWDDYIVLFGCGTKLTVLDKTHTC |
| | PPCPAPEFEGGPSVFLFPPKPKDTLMISRTPEVTCVVVAVSHEDPEVKFNWYVDGVEVHNAKTKPREEQYGSTYRVVSVLTVLH |
| | QDWLNGKEYKCKVSNKALPAPIEKTISKAKGQPREPQVYTLPPSREEMTKNQVSLSCAVKGFYPSDIAVEWESNGQPENNYKTT |
| | PPVLDSDGSFFLVSKLTVDKSRWQQGNVFSCSVMHEALHNHYTQKSLSLSPG |
| 245 | 2scDb-AFc-5 Chain1: |
| | EVQLVESGGGLVKPGGSLRLSCAASGFTFSSYGMHWVRQAPGKGLEWVAFIRYDGSNKYYADSVKGRFTISRDNSKNTLYLQMN |
| | SLRAEDTAVYYCAKDRGLGDGTYFDYWGQGTTVTVSSGGSGGSGGSQPVLTQPPSVSVAPGKTARITCGGNNIGSKSVHWYQQK |
| | PGQAPVLVIYYDSDRPSGIPERFSGSNSGNTATLTISRVEAGDEADYYCQVWDTSSDHVLFGGGTKLTVLGGSGGSGGSGGSGG |
| | SGGSGGSQVQLQESGPGLVKPSETLSLTCTVSGGSVSSGSYYWSWIRQPPGKGLEWIGYIYYSGSTNYNPSLKSRVTISVDTSK |
| | NQFSLKLSSVTAADTAVYYCARNPISIPAFDIWGQGTMVTVSSGGSGGSGGSQSALTQPASVSGSPGQSITISCSGSSSNIGNN |
| | AVNWYQQLPGKAPKLLIYYDDLLPSGVSDRFSGSKSGTSAFLAISGLQSEDEADYYCAAWDDSLNGPVFGGGTKLTVLDKTHTC |
| | PPCPAPEFEGGPSVFLFPPKPKDTLMISRTPEVTCVVVAVSHEDPEVKFNWYVDGVEVHNAKTKPREEQYGSTYRVVSVLTVLH |
| | QDWLNGKEYKCKVSNKALPAPIEKTISKAKGQPREPQVYTLPPSREEMTKNQVSLWCLVKGFYPSDIAVEWESNGQPENNYKTT |
| | PPVLDSDGSFFLYSKLTVDKSRWQQGNVFSCSVMHEALHNHYTQKSLSLSPG |
| 246 | 2scDb-AFc-5 Chain2: |
| | EVQLVQSGAEVKKPGASVKVSCKASGYTFTNYYMQWVRQAPGQCLEWMGIINPSGGVTSYAQKFQGRVTMTRDTSTSTVYMELS |
| | SLRSEDTAVYYCARGSAYYYDFADYWGQGTLVTVSSGGSGGSGGSQPVLTQPPSVSVAPGKTARITCGGNNIGSKSVHWYQQKP |
| | GQAPVLVIYYDSDRPSGIPERFSGSNSGNTATLTISRVEAGDEADYYCQVWDTSSDHVLFGGGTKLTVLGGSGGSGGSGGSGGS |
| | GGSGGSQVQLQESGPGLVKPSETLSLTCTVSGGSVSSGSYYWSWIRQPPGKGLEWIGYIYYSGSTNYNPSLKSRVTISVDTSKN |
| | QFSLKLSSVTAADTAVYYCARNPISIPAFDIWGQGTMVTVSSGGSGGSGGSSYELTQPLSVSVALGQTARITCGGNNIGSKSVH |
| | WYQQKPGQAPVLVIYQDKKRPSGIPERFSGSNSGNTATLTISRAQAGDEADYYCQVWDDYIVLFGCGTKLTVLDKTHTCPPCPA |
| | PEFEGGPSVFLFPPKPKDTLMISRTPEVTCVVVAVSHEDPEVKFNWYVDGVEVHNAKTKPREEQYGSTYRVVSVLTVLHQDWLN |
| | GKEYKCKVSNKALPAPIEKTISKAKGQPREPQVYTLPPSREEMTKNQVSLSCAVKGFYPSDIAVEWESNGQPENNYKTTPPVLD |
| | SDGSFFLVSKLTVDKSRWQQGNVFSCSVMHEALHNHYTQKSLSLSPG |
| 247 | 2scDb-AFc-6 Chain1: |
| | EVQLQQWGAGLLKPSETLSLTCAVYGGSFSGYYWSWIRQPPGKGLEWIGEIDHSGSTNYNPSLKSRVTISVDTSKNQFSLKLSS |
| | VTAADTAVYYCARARGPWSFDPWGQGTLVTVSSGGSGGSGGSQPVLTQPPSVSVAPGKTARITCGGNNIGSKSVHWYQQKPGQA |
| | PVLVIYYDSDRPSGIPERFSGSNSGNTATLTISRVEAGDEADYYCQVWDTSSDHVLFGGGTKLTVLGGSGGSGGSGGSGGSGGS |
| | GGSQVQLQESGPGLVKPSETLSLTCTVSGGSVSSGSYYWSWIRQPPGKGLEWIGYIYYSGSTNYNPSLKSRVTISVDTSKNQFS |
| | LKLSSVTAADTAVYYCARNPISIPAFDIWGQGTMVTVSSGGSGGSGGSDIQMTQSPSTLSASVGDRVTITCRASQSISSWLAWY |
| | QQKPGKAPKLLIYKASSLESGVPSRFSGSGSGTEFTLTISSLQPDDFATYYCQQYNSYPTFGGGTKVEIKDKTHTCPPCPAPEF |
| | EGGPSVFLFPPKPKDTLMISRTPEVTCVVVAVSHEDPEVKFNWYVDGVEVHNAKTKPREEQYGSTYRVVSVLTVLHQDWLNGKE |
| | YKCKVSNKALPAPIEKTISKAKGQPREPQVYTLPPSREEMTKNQVSLWCLVKGFYPSDIAVEWESNGQPENNYKTTPPVLDSDG |
| | SFFLYSKLTVDKSRWQQGNVFSCSVMHEALHNHYTQKSLSLSPG |
| 248 | 2scDb-AFc-6 Chain2: |
| | EVQLVQSGAEVKKPGASVKVSCKASGYTFTNYYMQWVRQAPGQCLEWMGIINPSGGVTSYAQKFQGRVTMTRDTSTSTVYMELS |
| | SLRSEDTAVYYCARGSAYYYDFADYWGQGTLVTVSSGGSGGSGGSQPVLTQPPSVSVAPGKTARITCGGNNIGSKSVHWYQQKP |
| | GQAPVLVIYYDSDRPSGIPERFSGSNSGNTATLTISRVEAGDEADYYCQVWDTSSDHVLFGGGTKLTVLGGSGGSGGSGGSGGS |
| | GGSGGSQVQLQESGPGLVKPSETLSLTCTVSGGSVSSGSYYWSWIRQPPGKGLEWIGYIYYSGSTNYNPSLKSRVTISVDTSKN |
| | QFSLKLSSVTAADTAVYYCARNPISIPAFDIWGQGTMVTVSSGGSGGSGGSSYELTQPLSVSVALGQTARITCGGNNIGSKSVH |
| | WYQQKPGQAPVLVIYQDKKRPSGIPERFSGSNSGNTATLTISRAQAGDEADYYCQVWDDYIVLFGCGTKLTVLDKTHTCPPCPA |
| | PEFEGGPSVFLFPPKPKDTLMISRTPEVTCVVVAVSHEDPEVKFNWYVDGVEVHNAKTKPREEQYGSTYRVVSVLTVLHQDWLN |
| | GKEYKCKVSNKALPAPIEKTISKAKGQPREPQVYTLPPSREEMTKNQVSLSCAVKGFYPSDIAVEWESNGQPENNYKTTPPVLD |
| | SDGSFFLVSKLTVDKSRWQQGNVFSCSVMHEALHNHYTQKSLSLSPG |
| 249 | 2scDb-AFc-7 Chain1: |
| | EVQLQQSGPELVKPGASVKMSCKASGYTFTDYVINWGKQRSGQGLEWIGEIYPGSGTNYYNEKFKAKATLTADKSSNIAYMQLS |
| | SLTSEDSAVYFCARRGRYGLYAMDYWGQGTSVTVSSGGSGGSGGSQPVLTQPPSVSVAPGKTARITCGGNNIGSKSVHWYQQKP |
| | GQAPVLVIYYDSDRPSGIPERFSGSNSGNTATLTISRVEAGDEADYYCQVWDTSSDHVLFGGGTKLTVLGGSGGSGGSGGSGGS |
| | GGSGGSQVQLQESGPGLVKPSETLSLTCTVSGGSVSSGSYYWSWIRQPPGKGLEWIGYIYYSGSTNYNPSLKSRVTISVDTSKN |
| | QFSLKLSSVTAADTAVYYCARNPISIPAFDIWGQGTMVTVSSGGSGGSGGSDIQMTQTTSSLSASLGDRVTISCRASQDISNYL |
| | NWYQQKPDGTVKLLIYYTSRLHSGVPSRFSGSGSGTDYSLTINNLEQEDIATYFCQQGNTRPWTFGGGTKLEIKDKTHTCPPCP |
| | APEFEGGPSVFLFPPKPKDTLMISRTPEVTCVVVAVSHEDPEVKFNWYVDGVEVHNAKTKPREEQYGSTYRVVSVLTVLHQDWL |
| | NGKEYKCKVSNKALPAPIEKTISKAKGQPREPQVYTLPPSREEMTKNQVSLWCLVKGFYPSDIAVEWESNGQPENNYKTTPPVL |
| | DSDGSFFLYSKLTVDKSRWQQGNVFSCSVMHEALHNHYTQKSLSLSPG |
| 250 | 2scDb-AFc-7 Chain2: |
| | EVQLVQSGAEVKKPGASVKVSCKASGYTFTNYYMQWVRQAPGQCLEWMGIINPSGGVTSYAQKFQGRVTMTRDTSTSTVYMELS |
| | SLRSEDTAVYYCARGSAYYYDFADYWGQGTLVTVSSGGSGGSGGSQPVLTQPPSVSVAPGKTARITCGGNNIGSKSVHWYQQKP |
| | GQAPVLVIYYDSDRPSGIPERFSGSNSGNTATLTISRVEAGDEADYYCQVWDTSSDHVLFGGGTKLTVLGGSGGSGGSGGSGGS |
| | GGSGGSQVQLQESGPGLVKPSETLSLTCTVSGGSVSSGSYYWSWIRQPPGKGLEWIGYIYYSGSTNYNPSLKSRVTISVDTSKN |
| | QFSLKLSSVTAADTAVYYCARNPISIPAFDIWGQGTMVTVSSGGSGGSGGSSYELTQPLSVSVALGQTARITCGGNNIGSKSVH |
| | WYQQKPGQAPVLVIYQDKKRPSGIPERFSGSNSGNTATLTISRAQAGDEADYYCQVWDDYIVLFGCGTKLTVLDKTHTCPPCPA |
| | PEFEGGPSVFLFPPKPKDTLMISRTPEVTCVVVAVSHEDPEVKFNWYVDGVEVHNAKTKPREEQYGSTYRVVSVLTVLHQDWLN |
| | GKEYKCKVSNKALPAPIEKTISKAKGQPREPQVYTLPPSREEMTKNQVSLSCAVKGFYPSDIAVEWESNGQPENNYKTTPPVLD |
| | SDGSFFLVSKLTVDKSRWQQGNVFSCSVMHEALHNHYTQKSLSLSPG |
| 251 | 2scDb-AFc-8 Chain1: |
| | EVQLQQSGPELVKPGASVKISCKTSGYTFTEYTMHWVKQSHGKSLEWIGGISPNIGGTSYNQKFKGKATLTVDKSSSTAYMELR |
| | SLTSEDSAVYYCARRGGSFDYWGQGTTLTVSSGGSGGSGGSQPVLTQPPSVSVAPGKTARITCGGNNIGSKSVHWYQQKPGQAP |
| | VLVIYYDSDRPSGIPERFSGSNSGNTATLTISRVEAGDEADYYCQVWDTSSDHVLFGGGTKLTVLGGSGGSGGSGGSGGSGGSG |
| | GSQVQLQESGPGLVKPSETLSLTCTVSGGSVSSGSYYWSWIRQPPGKGLEWIGYIYYSGSTNYNPSLKSRVTISVDTSKNQFSL |
| | KLSSVTAADTAVYYCARNPISIPAFDIWGQGTMVTVSSGGSGGSGGSDIVMTQSPATLSVTPGDRVSLSCRASQSISDYLHWYQ |
| | QKSHESPRLLIKYASQSISGIPSRFSGSGSGSDFTLSINSVEPEDVGVYYCQNGHSFPLTFGAGTKLELKDKTHTCPPCPAPEF |
| | EGGPSVFLFPPKPKDTLMISRTPEVTCVVVAVSHEDPEVKFNWYVDGVEVHNAKTKPREEQYGSTYRVVSVLTVLHQDWLNGKE |
| | YKCKVSNKALPAPIEKTISKAKGQPREPQVYTLPPSREEMTKNQVSLWCLVKGFYPSDIAVEWESNGQPENNYKTTPPVLDSDG |
| | SFFLYSKLTVDKSRWQQGNVFSCSVMHEALHNHYTQKSLSLSPG |
| 252 | 2scDb-AFc-8 Chain2: |
| | EVQLVQSGAEVKKPGASVKVSCKASGYTFTNYYMQWVRQAPGQCLEWMGIINPSGGVTSYAQKFQGRVTMTRDTSTSTVYMELS |
| | SLRSEDTAVYYCARGSAYYYDFADYWGQGTLVTVSSGGSGGSGGSQPVLTQPPSVSVAPGKTARITCGGNNIGSKSVHWYQQKP |
| | GQAPVLVIYYDSDRPSGIPERFSGSNSGNTATLTISRVEAGDEADYYCQVWDTSSDHVLFGGGTKLTVLGGSGGSGGSGGSGGS |
| | GGSGGSQVQLQESGPGLVKPSETLSLTCTVSGGSVSSGSYYWSWIRQPPGKGLEWIGYIYYSGSTNYNPSLKSRVTISVDTSKN |
| | QFSLKLSSVTAADTAVYYCARNPISIPAFDIWGQGTMVTVSSGGSGGSGGSSYELTQPLSVSVALGQTARITCGGNNIGSKSVH |
| | WYQQKPGQAPVLVIYQDKKRPSGIPERFSGSNSGNTATLTISRAQAGDEADYYCQVWDDYIVLFGCGTKLTVLDKTHTCPPCPA |
| | PEFEGGPSVFLFPPKPKDTLMISRTPEVTCVVVAVSHEDPEVKFNWYVDGVEVHNAKTKPREEQYGSTYRVVSVLTVLHQDWLN |
| | GKEYKCKVSNKALPAPIEKTISKAKGQPREPQVYTLPPSREEMTKNQVSLSCAVKGFYPSDIAVEWESNGQPENNYKTTPPVLD |
| | SDGSFFLVSKLTVDKSRWQQGNVFSCSVMHEALHNHYTQKSLSLSPG |
| 253 | 1scDb-1scFv-AFc-1 Chain1: |
| | EVQLVESGGGLVKPGGSLRLSCAASGFTFSSYGMHWVRQAPGKGLEWVAFIRYDGSNKYYADSVKGRFTISRDNSKNTLYLQMN |
| | SLRAEDTAVYYCAKDRGLGDGTYFDYWGQGTTVTVSSGGSGGSGGSDIVMTQSPATLSLSPGERATLSCRSSKSLQNVNGNTYL |
| | YWFQQKPGQSPQLLIYRMSNLNSGVPDRFSGSGSGTEFTLTISSLEPEDFAVYYCMQHLEYPITFGAGTKLEIKGGSGGSGGSG |
| | GSGGSGGSGGSEVQLVESGGGLVKPGGSLKLSCAASGYTFTSYVMHWVRQAPGKGLEWIGYINPYNDGTKYNEKFQGRVTISSD |
| | KSISTAYMELSSLRSEDTAMYYCARGTYYYGTRVFDYWGQGTLVTVSSGGSGGSGGSQSALTQPASVSGSPGQSITISCSGSSS |
| | NIGNNAVNWYQQLPGKAPKLLIYYDDLLPSGVSDRFSGSKSGTSAFLAISGLQSEDEADYYCAAWDDSLNGPVFGGGTKLTVLD |
| | KTHTCPPCPAPELLGGPSVFLFPPKPKDTLMISRTPEVTCVVVDVSHEDPEVKFNWYVDGVEVHNAKTKPREEQYNSTYRVVSV |
| | LTVLHQDWLNGKEYKCKVSNKALPAPIEKTISKAKGQPREPQVYTLPPSREEMTKNQVSLWCLVKGFYPSDIAVEWESNGQPEN |
| | NYKTTPPVLDSDGSFFLYSKLTVDKSRWQQGNVFSCSVMHEALHNHYTQKSLSLSPG |
| 254 | 1scDb-1scFv-AFc-1 Chain2: |
| | DIVMTQSPATLSLSPGERATLSCRSSKSLQNVNGNTYLYWFQQKPGQSPQLLIYRMSNLNSGVPDRFSGSGSGTEFTLTISSLE |
| | PEDFAVYYCMQHLEYPITFGAGTKLEIKGGSGGSGGSGGSGGSGGSGGSEVQLVESGGGLVKPGGSLKLSCAASGYTFTSYVMH |
| | WVRQAPGKGLEWIGYINPYNDGTKYNEKFQGRVTISSDKSISTAYMELSSLRSEDTAMYYCARGTYYYGTRVFDYWGQGTLVTV |
| | SSDKTHTCPPCPAPELLGGPSVFLFPPKPKDTLMISRTPEVTCVVVDVSHEDPEVKFNWYVDGVEVHNAKTKPREEQYNSTYRV |
| | VSVLTVLHQDWLNGKEYKCKVSNKALPAPIEKTISKAKGQPREPQVYTLPPSREEMTKNQVSLSCAVKGFYPSDIAVEWESNGQ |
| | PENNYKTTPPVLDSDGSFFLVSKLTVDKSRWQQGNVFSCSVMHEALHNHYTQKSLSLSPG |
| 255 | 1scDb-1scFv-AFc-2 Chain1: |
| | EVQLQQWGAGLLKPSETLSLTCAVYGGSFSGYYWSWIRQPPGKGLEWIGEIDHSGSTNYNPSLKSRVTISVDTSKNQFSLKLSS |
| | VTAADTAVYYCARARGPWSFDPWGQGTLVTVSSGGSGGSGGSDIVMTQSPATLSLSPGERATLSCRSSKSLQNVNGNTYLYWFQ |
| | QKPGQSPQLLIYRMSNLNSGVPDRFSGSGSGTEFTLTISSLEPEDFAVYYCMQHLEYPITFGAGTKLEIKGGSGGSGGSGGSGG |
| | SGGSGGSEVQLVESGGGLVKPGGSLKLSCAASGYTFTSYVMHWVRQAPGKGLEWIGYINPYNDGTKYNEKFQGRVTISSDKSIS |
| | TAYMELSSLRSEDTAMYYCARGTYYYGTRVFDYWGQGTLVTVSSGGSGGSGGSDIQMTQSPSTLSASVGDRVTITCRASQSISS |
| | WLAWYQQKPGKAPKLLIYKASSLESGVPSRFSGSGSGTEFTLTISSLQPDDFATYYCQQYNSYPTFGGGTKVEIKDKTHTCPPC |
| | PAPELLGGPSVFLFPPKPKDTLMISRTPEVTCVVVDVSHEDPEVKFNWYVDGVEVHNAKTKPREEQYNSTYRVVSVLTVLHQDW |
| | LNGKEYKCKVSNKALPAPIEKTISKAKGQPREPQVYTLPPSREEMTKNQVSLWCLVKGFYPSDIAVEWESNGQPENNYKTTPPV |
| | LDSDGSFFLYSKLTVDKSRWQQGNVFSCSVMHEALHNHYTQKSLSLSPG |
| 256 | 1scDb-1scFv-AFc-2 Chain2: |
| | DIVMTQSPATLSLSPGERATLSCRSSKSLQNVNGNTYLYWFQQKPGQSPQLLIYRMSNLNSGVPDRFSGSGSGTEFTLTISSLE |
| | PEDFAVYYCMQHLEYPITFGAGTKLEIKGGSGGSGGSGGSGGSGGSGGSEVQLVESGGGLVKPGGSLKLSCAASGYTFTSYVMH |
| | WVRQAPGKGLEWIGYINPYNDGTKYNEKFQGRVTISSDKSISTAYMELSSLRSEDTAMYYCARGTYYYGTRVFDYWGQGTLVTV |
| | SSDKTHTCPPCPAPELLGGPSVFLFPPKPKDTLMISRTPEVTCVVVDVSHEDPEVKFNWYVDGVEVHNAKTKPREEQYNSTYRV |
| | VSVLTVLHQDWLNGKEYKCKVSNKALPAPIEKTISKAKGQPREPQVYTLPPSREEMTKNQVSLSCAVKGFYPSDIAVEWESNGQ |
| | PENNYKTTPPVLDSDGSFFLVSKLTVDKSRWQQGNVFSCSVMHEALHNHYTQKSLSLSPG |
| 257 | 1scDb-1scFv-AFc-3 Chain1: |
| | EVQLQQSGPELVKPGASVKMSCKASGYTFTDYVINWGKQRSGQGLEWIGEIYPGSGTNYYNEKFKAKATLTADKSSNIAYMQLS |
| | SLTSEDSAVYFCARRGRYGLYAMDYWGQGTSVTVSSGGSGGSGGSDIVMTQSPATLSLSPGERATLSCRSSKSLQNVNGNTYLY |
| | WFQQKPGQSPQLLIYRMSNLNSGVPDRFSGSGSGTEFTLTISSLEPEDFAVYYCMQHLEYPITFGAGTKLEIKGGSGGSGGSGG |
| | SGGSGGSGGSEVQLVESGGGLVKPGGSLKLSCAASGYTFTSYVMHWVRQAPGKGLEWIGYINPYNDGTKYNEKFQGRVTISSDK |
| | SISTAYMELSSLRSEDTAMYYCARGTYYYGTRVFDYWGQGTLVTVSSGGSGGSGGSDIQMTQTTSSLSASLGDRVTISCRASQD |
| | ISNYLNWYQQKPDGTVKLLIYYTSRLHSGVPSRFSGSGSGTDYSLTINNLEQEDIATYFCQQGNTRPWTFGGGTKLEIKDKTHT |
| | CPPCPAPELLGGPSVFLFPPKPKDTLMISRTPEVTCVVVDVSHEDPEVKFNWYVDGVEVHNAKTKPREEQYNSTYRVVSVLTVL |
| | HQDWLNGKEYKCKVSNKALPAPIEKTISKAKGQPREPQVYTLPPSREEMTKNQVSLWCLVKGFYPSDIAVEWESNGQPENNYKT |
| | TPPVLDSDGSFFLYSKLTVDKSRWQQGNVFSCSVMHEALHNHYTQKSLSLSPG |
| 258 | 1scDb-1scFv-AFc-3 Chain2: |
| | DIVMTQSPATLSLSPGERATLSCRSSKSLQNVNGNTYLYWFQQKPGQSPQLLIYRMSNLNSGVPDRFSGSGSGTEFTLTISSLE |
| | PEDFAVYYCMQHLEYPITFGAGTKLEIKGGSGGSGGSGGSGGSGGSGGSEVQLVESGGGLVKPGGSLKLSCAASGYTFTSYVMH |
| | WVRQAPGKGLEWIGYINPYNDGTKYNEKFQGRVTISSDKSISTAYMELSSLRSEDTAMYYCARGTYYYGTRVFDYWGQGTLVTV |
| | SSDKTHTCPPCPAPELLGGPSVFLFPPKPKDTLMISRTPEVTCVVVDVSHEDPEVKFNWYVDGVEVHNAKTKPREEQYNSTYRV |
| | VSVLTVLHQDWLNGKEYKCKVSNKALPAPIEKTISKAKGQPREPQVYTLPPSREEMTKNQVSLSCAVKGFYPSDIAVEWESNGQ |
| | PENNYKTTPPVLDSDGSFFLVSKLTVDKSRWQQGNVFSCSVMHEALHNHYTQKSLSLSPG |
| 259 | 1scDb-1scFv-AFc-4 Chain1: |
| | EVQLQQSGPELVKPGASVKISCKTSGYTFTEYTMHWVKQSHGKSLEWIGGISPNIGGTSYNQKFKGKATLTVDKSSSTAYMELR |
| | SLTSEDSAVYYCARRGGSFDYWGQGTTLTVSSGGSGGSGGSDIVMTQSPATLSLSPGERATLSCRSSKSLQNVNGNTYLYWFQQ |
| | KPGQSPQLLIYRMSNLNSGVPDRFSGSGSGTEFTLTISSLEPEDFAVYYCMQHLEYPITFGAGTKLEIKGGSGGSGGSGGSGGS |
| | GGSGGSEVQLVESGGGLVKPGGSLKLSCAASGYTFTSYVMHWVRQAPGKGLEWIGYINPYNDGTKYNEKFQGRVTISSDKSIST |
| | AYMELSSLRSEDTAMYYCARGTYYYGTRVFDYWGQGTLVTVSSGGSGGSGGSDIVMTQSPATLSVTPGDRVSLSCRASQSISDY |
| | LHWYQQKSHESPRLLIKYASQSISGIPSRFSGSGSGSDFTLSINSVEPEDVGVYYCQNGHSFPLTFGAGTKLELKDKTHTCPPC |
| | PAPELLGGPSVFLFPPKPKDTLMISRTPEVTCVVVDVSHEDPEVKFNWYVDGVEVHNAKTKPREEQYNSTYRVVSVLTVLHQDW |
| | LNGKEYKCKVSNKALPAPIEKTISKAKGQPREPQVYTLPPSREEMTKNQVSLWCLVKGFYPSDIAVEWESNGQPENNYKTTPPV |
| | LDSDGSFFLYSKLTVDKSRWQQGNVFSCSVMHEALHNHYTQKSLSLSPG |
| 260 | 1scDb-1scFv-AFc-4 Chain2: |
| | DIVMTQSPATLSLSPGERATLSCRSSKSLQNVNGNTYLYWFQQKPGQSPQLLIYRMSNLNSGVPDRFSGSGSGTEFTLTISSLE |
| | PEDFAVYYCMQHLEYPITFGAGTKLEIKGGSGGSGGSGGSGGSGGSGGSEVQLVESGGGLVKPGGSLKLSCAASGYTFTSYVMH |
| | WVRQAPGKGLEWIGYINPYNDGTKYNEKFQGRVTISSDKSISTAYMELSSLRSEDTAMYYCARGTYYYGTRVFDYWGQGTLVTV |
| | SSDKTHTCPPCPAPELLGGPSVFLFPPKPKDTLMISRTPEVTCVVVDVSHEDPEVKFNWYVDGVEVHNAKTKPREEQYNSTYRV |
| | VSVLTVLHQDWLNGKEYKCKVSNKALPAPIEKTISKAKGQPREPQVYTLPPSREEMTKNQVSLSCAVKGFYPSDIAVEWESNGQ |
| | PENNYKTTPPVLDSDGSFFLVSKLTVDKSRWQQGNVFSCSVMHEALHNHYTQKSLSLSPG |
| 261 | 2scDb-AFc-9 Chain1: |
| | EVQLVESGGGLVKPGGSLRLSCAASGFTFSSYGMHWVRQAPGKGLEWVAFIRYDGSNKYYADSVKGRFTISRDNSKNTLYLQMN |
| | SLRAEDTAVYYCAKDRGLGDGTYFDYWGQGTTVTVSSGGSGGSGGSDIVMTQSPATLSLSPGERATLSCRSSKSLQNVNGNTYL |
| | YWFQQKPGQSPQLLIYRMSNLNSGVPDRFSGSGSGTEFTLTISSLEPEDFAVYYCMQHLEYPITFGAGTKLEIKGGSGGSGGSG |
| | GSGGSGGSGGSEVQLVESGGGLVKPGGSLKLSCAASGYTFTSYVMHWVRQAPGKGLEWIGYINPYNDGTKYNEKFQGRVTISSD |
| | KSISTAYMELSSLRSEDTAMYYCARGTYYYGTRVFDYWGQGTLVTVSSGGSGGSGGSQSALTQPASVSGSPGQSITISCSGSSS |
| | NIGNNAVNWYQQLPGKAPKLLIYYDDLLPSGVSDRFSGSKSGTSAFLAISGLQSEDEADYYCAAWDDSLNGPVFGGGTKLTVLD |
| | KTHTCPPCPAPEFEGGPSVFLFPPKPKDTLMISRTPEVTCVVVAVSHEDPEVKFNWYVDGVEVHNAKTKPREEQYGSTYRVVSV |
| | LTVLHQDWLNGKEYKCKVSNKALPAPIEKTISKAKGQPREPQVYTLPPSREEMTKNQVSLWCLVKGFYPSDIAVEWESNGQPEN |
| | NYKTTPPVLDSDGSFFLYSKLTVDKSRWQQGNVFSCSVMHEALHNHYTQKSLSLSPG |
| 262 | 2scDb-AFc-9 Chain2: |
| | QVTLKESGPGILQPSQTLSLTCSFSGFSLRTSGMGVGWIRQPSGKGLEWLAHIWWDDDKRYNPALKSRLTISKDTSSNQVFLKI |
| | ASVDTADTATYYCAQINPAWFAYWGQGTLVTVSAGGSGGSGGSDIVMTQSPATLSLSPGERATLSCRSSKSLQNVNGNTYLYWF |
| | QQKPGQSPQLLIYRMSNLNSGVPDRFSGSGSGTEFTLTISSLEPEDFAVYYCMQHLEYPITFGAGTKLEIKGGSGGSGGSGGSG |
| | GSGGSGGSEVQLVESGGGLVKPGGSLKLSCAASGYTFTSYVMHWVRQAPGKGLEWIGYINPYNDGTKYNEKFQGRVTISSDKSI |
| | STAYMELSSLRSEDTAMYYCARGTYYYGTRVFDYWGQGTLVTVSSGGSGGSGGSDIVLTQSPASLAVSLGQRATISCKASQSVD |
| | FDGDSFMNWYQQKPGQPPKLLIYTTSNLESGIPARFSASGSGTDFTLNIHPVEEEDTATYYCQQSNEDPYTFGGGTKLELKDKT |
| | HTCPPCPAPEFEGGPSVFLFPPKPKDTLMISRTPEVTCVVVAVSHEDPEVKFNWYVDGVEVHNAKTKPREEQYGSTYRVVSVLT |
| | VLHQDWLNGKEYKCKVSNKALPAPIEKTISKAKGQPREPQVYTLPPSREEMTKNQVSLSCAVKGFYPSDIAVEWESNGQPENNY |
| | KTTPPVLDSDGSFFLVSKLTVDKSRWQQGNVFSCSVMHEALHNHYTQKSLSLSPG |
| 263 | 2scDb-AFc-10 Chain1: |
| | EVQLQQWGAGLLKPSETLSLTCAVYGGSFSGYYWSWIRQPPGKGLEWIGEIDHSGSTNYNPSLKSRVTISVDTSKNQFSLKLSS |
| | VTAADTAVYYCARARGPWSFDPWGQGTLVTVSSGGSGGSGGSDIVMTQSPATLSLSPGERATLSCRSSKSLQNVNGNTYLYWFQ |
| | QKPGQSPQLLIYRMSNLNSGVPDRFSGSGSGTEFTLTISSLEPEDFAVYYCMQHLEYPITFGAGTKLEIKGGSGGSGGSGGSGG |
| | SGGSGGSEVQLVESGGGLVKPGGSLKLSCAASGYTFTSYVMHWVRQAPGKGLEWIGYINPYNDGTKYNEKFQGRVTISSDKSIS |
| | TAYMELSSLRSEDTAMYYCARGTYYYGTRVFDYWGQGTLVTVSSGGSGGSGGSDIQMTQSPSTLSASVGDRVTITCRASQSISS |
| | WLAWYQQKPGKAPKLLIYKASSLESGVPSRFSGSGSGTEFTLTISSLQPDDFATYYCQQYNSYPTFGGGTKVEIKDKTHTCPPC |
| | PAPEFEGGPSVFLFPPKPKDTLMISRTPEVTCVVVAVSHEDPEVKFNWYVDGVEVHNAKTKPREEQYGSTYRVVSVLTVLHQDW |
| | LNGKEYKCKVSNKALPAPIEKTISKAKGQPREPQVYTLPPSREEMTKNQVSLWCLVKGFYPSDIAVEWESNGQPENNYKTTPPV |
| | LDSDGSFFLYSKLTVDKSRWQQGNVFSCSVMHEALHNHYTQKSLSLSPG |
| 264 | 2scDb-AFc-10 Chain2: |
| | QVTLKESGPGILQPSQTLSLTCSFSGFSLRTSGMGVGWIRQPSGKGLEWLAHIWWDDDKRYNPALKSRLTISKDTSSNQVFLKI |
| | ASVDTADTATYYCAQINPAWFAYWGQGTLVTVSAGGSGGSGGSDIVMTQSPATLSLSPGERATLSCRSSKSLQNVNGNTYLYWF |
| | QQKPGQSPQLLIYRMSNLNSGVPDRFSGSGSGTEFTLTISSLEPEDFAVYYCMQHLEYPITFGAGTKLEIKGGSGGSGGSGGSG |
| | GSGGSGGSEVQLVESGGGLVKPGGSLKLSCAASGYTFTSYVMHWVRQAPGKGLEWIGYINPYNDGTKYNEKFQGRVTISSDKSI |
| | STAYMELSSLRSEDTAMYYCARGTYYYGTRVFDYWGQGTLVTVSSGGSGGSGGSDIVLTQSPASLAVSLGQRATISCKASQSVD |
| | FDGDSFMNWYQQKPGQPPKLLIYTTSNLESGIPARFSASGSGTDFTLNIHPVEEEDTATYYCQQSNEDPYTFGGGTKLELKDKT |
| | HTCPPCPAPEFEGGPSVFLFPPKPKDTLMISRTPEVTCVVVAVSHEDPEVKFNWYVDGVEVHNAKTKPREEQYGSTYRVVSVLT |
| | VLHQDWLNGKEYKCKVSNKALPAPIEKTISKAKGQPREPQVYTLPPSREEMTKNQVSLSCAVKGFYPSDIAVEWESNGQPENNY |
| | KTTPPVLDSDGSFFLVSKLTVDKSRWQQGNVFSCSVMHEALHNHYTQKSLSLSPG |
| 265 | 2scDb-AFc-11 Chain1: |
| | EVQLQQSGPELVKPGASVKMSCKASGYTFTDYVINWGKQRSGQGLEWIGEIYPGSGTNYYNEKFKAKATLTADKSSNIAYMQLS |
| | SLTSEDSAVYFCARRGRYGLYAMDYWGQGTSVTVSSGGSGGSGGSDIVMTQSPATLSLSPGERATLSCRSSKSLQNVNGNTYLY |
| | WFQQKPGQSPQLLIYRMSNLNSGVPDRFSGSGSGTEFTLTISSLEPEDFAVYYCMQHLEYPITFGAGTKLEIKGGSGGSGGSGG |
| | SGGSGGSGGSEVQLVESGGGLVKPGGSLKLSCAASGYTFTSYVMHWVRQAPGKGLEWIGYINPYNDGTKYNEKFQGRVTISSDK |
| | SISTAYMELSSLRSEDTAMYYCARGTYYYGTRVFDYWGQGTLVTVSSGGSGGSGGSDIQMTQTTSSLSASLGDRVTISCRASQD |
| | ISNYLNWYQQKPDGTVKLLIYYTSRLHSGVPSRFSGSGSGTDYSLTINNLEQEDIATYFCQQGNTRPWTFGGGTKLEIKDKTHT |
| | CPPCPAPEFEGGPSVFLFPPKPKDTLMISRTPEVTCVVVAVSHEDPEVKFNWYVDGVEVHNAKTKPREEQYGSTYRVVSVLTVL |
| | HQDWLNGKEYKCKVSNKALPAPIEKTISKAKGQPREPQVYTLPPSREEMTKNQVSLWCLVKGFYPSDIAVEWESNGQPENNYKT |
| | TPPVLDSDGSFFLYSKLTVDKSRWQQGNVFSCSVMHEALHNHYTQKSLSLSPG |
| 266 | 2scDb-AFc-11 Chain2: |
| | QVTLKESGPGILQPSQTLSLTCSFSGFSLRTSGMGVGWIRQPSGKGLEWLAHIWWDDDKRYNPALKSRLTISKDTSSNQVFLKI |
| | ASVDTADTATYYCAQINPAWFAYWGQGTLVTVSAGGSGGSGGSDIVMTQSPATLSLSPGERATLSCRSSKSLQNVNGNTYLYWF |
| | QQKPGQSPQLLIYRMSNLNSGVPDRFSGSGSGTEFTLTISSLEPEDFAVYYCMQHLEYPITFGAGTKLEIKGGSGGSGGSGGSG |
| | GSGGSGGSEVQLVESGGGLVKPGGSLKLSCAASGYTFTSYVMHWVRQAPGKGLEWIGYINPYNDGTKYNEKFQGRVTISSDKSI |
| | STAYMELSSLRSEDTAMYYCARGTYYYGTRVFDYWGQGTLVTVSSGGSGGSGGSDIVLTQSPASLAVSLGQRATISCKASQSVD |
| | FDGDSFMNWYQQKPGQPPKLLIYTTSNLESGIPARFSASGSGTDFTLNIHPVEEEDTATYYCQQSNEDPYTFGGGTKLELKDKT |
| | HTCPPCPAPEFEGGPSVFLFPPKPKDTLMISRTPEVTCVVVAVSHEDPEVKFNWYVDGVEVHNAKTKPREEQYGSTYRVVSVLT |
| | VLHQDWLNGKEYKCKVSNKALPAPIEKTISKAKGQPREPQVYTLPPSREEMTKNQVSLSCAVKGFYPSDIAVEWESNGQPENNY |
| | KTTPPVLDSDGSFFLVSKLTVDKSRWQQGNVFSCSVMHEALHNHYTQKSLSLSPG |
| 267 | 2scDb-AFc-12 Chain1: |
| | EVQLQQSGPELVKPGASVKISCKTSGYTFTEYTMHWVKQSHGKSLEWIGGISPNIGGTSYNQKFKGKATLTVDKSSSTAYMELR |
| | SLTSEDSAVYYCARRGGSFDYWGQGTTLTVSSGGSGGSGGSDIVMTQSPATLSLSPGERATLSCRSSKSLQNVNGNTYLYWFQQ |
| | KPGQSPQLLIYRMSNLNSGVPDRFSGSGSGTEFTLTISSLEPEDFAVYYCMQHLEYPITFGAGTKLEIKGGSGGSGGSGGSGGS |
| | GGSGGSEVQLVESGGGLVKPGGSLKLSCAASGYTFTSYVMHWVRQAPGKGLEWIGYINPYNDGTKYNEKFQGRVTISSDKSIST |
| | AYMELSSLRSEDTAMYYCARGTYYYGTRVFDYWGQGTLVTVSSGGSGGSGGSDIVMTQSPATLSVTPGDRVSLSCRASQSISDY |
| | LHWYQQKSHESPRLLIKYASQSISGIPSRFSGSGSGSDFTLSINSVEPEDVGVYYCQNGHSFPLTFGAGTKLELKDKTHTCPPC |
| | PAPEFEGGPSVFLFPPKPKDTLMISRTPEVTCVVVAVSHEDPEVKFNWYVDGVEVHNAKTKPREEQYGSTYRVVSVLTVLHQDW |
| | LNGKEYKCKVSNKALPAPIEKTISKAKGQPREPQVYTLPPSREEMTKNQVSLWCLVKGFYPSDIAVEWESNGQPENNYKTTPPV |
| | LDSDGSFFLYSKLTVDKSRWQQGNVFSCSVMHEALHNHYTQKSLSLSPG |
| 268 | 2scDb-AFc-12 Chain2: |
| | QVTLKESGPGILQPSQTLSLTCSFSGFSLRTSGMGVGWIRQPSGKGLEWLAHIWWDDDKRYNPALKSRLTISKDTSSNQVFLKI |
| | ASVDTADTATYYCAQINPAWFAYWGQGTLVTVSAGGSGGSGGSDIVMTQSPATLSLSPGERATLSCRSSKSLQNVNGNTYLYWF |
| | QQKPGQSPQLLIYRMSNLNSGVPDRFSGSGSGTEFTLTISSLEPEDFAVYYCMQHLEYPITFGAGTKLEIKGGSGGSGGSGGSG |
| | GSGGSGGSEVQLVESGGGLVKPGGSLKLSCAASGYTFTSYVMHWVRQAPGKGLEWIGYINPYNDGTKYNEKFQGRVTISSDKSI |
| | STAYMELSSLRSEDTAMYYCARGTYYYGTRVFDYWGQGTLVTVSSGGSGGSGGSDIVLTQSPASLAVSLGQRATISCKASQSVD |
| | FDGDSFMNWYQQKPGQPPKLLIYTTSNLESGIPARFSASGSGTDFTLNIHPVEEEDTATYYCQQSNEDPYTFGGGTKLELKDKT |
| | HTCPPCPAPEFEGGPSVFLFPPKPKDTLMISRTPEVTCVVVAVSHEDPEVKFNWYVDGVEVHNAKTKPREEQYGSTYRVVSVLT |
| | VLHQDWLNGKEYKCKVSNKALPAPIEKTISKAKGQPREPQVYTLPPSREEMTKNQVSLSCAVKGFYPSDIAVEWESNGQPENNY |
| | KTTPPVLDSDGSFFLVSKLTVDKSRWQQGNVFSCSVMHEALHNHYTQKSLSLSPG |
| 269 | 2tascFv-AFc-1 Chain1: |
| | EVQLVESGGGLVKPGGSLKLSCAASGYTFTSYVMHWVRQAPGKGLEWIGYINPYNDGTKYNEKFQGRVTISSDKSISTAYMELS |
| | SLRSEDTAMYYCARGTYYYGTRVFDYWGQGTLVTVSSGGSGGSGGSGGSGGSGGSDIVMTQSPATLSLSPGERATLSCRSSKSL |
| | QNVNGNTYLYWFQQKPGQSPQLLIYRMSNLNSGVPDRFSGSGSGTEFTLTISSLEPEDFAVYYCMQHLEYPITFGAGTKLEIKG |
| | GGGSQSALTQPASVSGSPGQSITISCSGSSSNIGNNAVNWYQQLPGKAPKLLIYYDDLLPSGVSDRFSGSKSGTSAFLAISGLQ |
| | SEDEADYYCAAWDDSLNGPVFGGGTKLTVLGGSGGSGGSGGSGGSGGSGGSQVQLVESGGGLVKPGGSLRLSCAASGFTFSSYG |
| | MHWVRQAPGKGLEWVAFIRYDGSNKYYADSVKGRFTISRDNSKNTLYLQMNSLRAEDTAVYYCAKDRGLGDGTYFDYWGQGTTV |
| | TVSSDKTHTCPPCPAPEFEGGPSVFLFPPKPKDTLMISRTPEVTCVVVAVSHEDPEVKFNWYVDGVEVHNAKTKPREEQYGSTY |
| | RVVSVLTVLHQDWLNGKEYKCKVSNKALPAPIEKTISKAKGQPREPQVYTLPPSREEMTKNQVSLWCLVKGFYPSDIAVEWESN |
| | GQPENNYKTTPPVLDSDGSFFLYSKLTVDKSRWQQGNVFSCSVMHEALHNHYTQKSLSLSPG |
| 270 | 2tascFv-AFc-1 Chain2: |
| | EVQLVESGGGLVKPGGSLKLSCAASGYTFTSYVMHWVRQAPGKGLEWIGYINPYNDGTKYNEKFQGRVTISSDKSISTAYMELS |
| | SLRSEDTAMYYCARGTYYYGTRVFDYWGQGTLVTVSSGGSGGSGGSGGSGGSGGSDIVMTQSPATLSLSPGERATLSCRSSKSL |
| | QNVNGNTYLYWFQQKPGQSPQLLIYRMSNLNSGVPDRFSGSGSGTEFTLTISSLEPEDFAVYYCMQHLEYPITFGAGTKLEIKG |
| | GGGSSYELTQPLSVSVALGQTARITCGGNNIGSKSVHWYQQKPGQAPVLVIYQDKKRPSGIPERFSGSNSGNTATLTISRAQAG |
| | DEADYYCQVWDDYIVLFGCGTKLTVLGGSGGSGGSGGSGGSGGSGGSQVQLVQSGAEVKKPGASVKVSCKASGYTFTNYYMQWV |
| | RQAPGQCLEWMGIINPSGGVTSYAQKFQGRVTMTRDTSTSTVYMELSSLRSEDTAVYYCARGSAYYYDFADYWGQGTLVTVSSD |
| | KTHTCPPCPAPEFEGGPSVFLFPPKPKDTLMISRTPEVTCVVVAVSHEDPEVKFNWYVDGVEVHNAKTKPREEQYGSTYRVVSV |
| | LTVLHQDWLNGKEYKCKVSNKALPAPIEKTISKAKGQPREPQVYTLPPSREEMTKNQVSLSCAVKGFYPSDIAVEWESNGQPEN |
| | NYKTTPPVLDSDGSFFLVSKLTVDKSRWQQGNVFSCSVMHEALHNHYTQKSLSLSPG |
| 271 | 2tascFv-AFc-2 Chain1: |
| | EVQLVESGGGLVKPGGSLKLSCAASGYTFTSYVMHWVRQAPGKGLEWIGYINPYNDGTKYNEKFQGRVTISSDKSISTAYMELS |
| | SLRSEDTAMYYCARGTYYYGTRVFDYWGQGTLVTVSSGGSGGSGGSGGSGGSGGSDIVMTQSPATLSLSPGERATLSCRSSKSL |
| | QNVNGNTYLYWFQQKPGQSPQLLIYRMSNLNSGVPDRFSGSGSGTEFTLTISSLEPEDFAVYYCMQHLEYPITFGAGTKLEIKG |
| | GGGSDIQMTQSPSTLSASVGDRVTITCRASQSISSWLAWYQQKPGKAPKLLIYKASSLESGVPSRFSGSGSGTEFTLTISSLQP |
| | DDFATYYCQQYNSYPTFGGGTKVEIKGGSGGSGGSGGSGGSGGSGGSQVQLQQWGAGLLKPSETLSLTCAVYGGSFSGYYWSWI |
| | RQPPGKGLEWIGEIDHSGSTNYNPSLKSRVTISVDTSKNQFSLKLSSVTAADTAVYYCARARGPWSFDPWGQGTLVTVSSDKTH |
| | TCPPCPAPEFEGGPSVFLFPPKPKDTLMISRTPEVTCVVVAVSHEDPEVKFNWYVDGVEVHNAKTKPREEQYGSTYRVVSVLTV |
| | LHQDWLNGKEYKCKVSNKALPAPIEKTISKAKGQPREPQVYTLPPSREEMTKNQVSLWCLVKGFYPSDIAVEWESNGQPENNYK |
| | TTPPVLDSDGSFFLYSKLTVDKSRWQQGNVFSCSVMHEALHNHYTQKSLSLSPG |
| 272 | 2tascFv-AFc-2 Chain2: |
| | EVQLVESGGGLVKPGGSLKLSCAASGYTFTSYVMHWVRQAPGKGLEWIGYINPYNDGTKYNEKFQGRVTISSDKSISTAYMELS |
| | SLRSEDTAMYYCARGTYYYGTRVFDYWGQGTLVTVSSGGSGGSGGSGGSGGSGGSDIVMTQSPATLSLSPGERATLSCRSSKSL |
| | QNVNGNTYLYWFQQKPGQSPQLLIYRMSNLNSGVPDRFSGSGSGTEFTLTISSLEPEDFAVYYCMQHLEYPITFGAGTKLEIKG |
| | GGGSSYELTQPLSVSVALGQTARITCGGNNIGSKSVHWYQQKPGQAPVLVIYQDKKRPSGIPERFSGSNSGNTATLTISRAçAG |
| | DEADYYCQVWDDYIVLFGCGTKLTVLGGSGGSGGSGGSGGSGGSGGSQVQLVQSGAEVKKPGASVKVSCKASGYTFTNYYMQWV |
| | RQAPGQCLEWMGIINPSGGVTSYAQKFQGRVTMTRDTSTSTVYMELSSLRSEDTAVYYCARGSAYYYDFADYWGQGTLVTVSSD |
| | KTHTCPPCPAPEFEGGPSVFLFPPKPKDTLMISRTPEVTCVVVAVSHEDPEVKFNWYVDGVEVHNAKTKPREEQYGSTYRVVSV |
| | LTVLHQDWLNGKEYKCKVSNKALPAPIEKTISKAKGQPREPQVYTLPPSREEMTKNQVSLSCAVKGFYPSDIAVEWESNGQPEN |
| | NYKTTPPVLDSDGSFFLVSKLTVDKSRWQQGNVFSCSVMHEALHNHYTQKSLSLSPG |
| 273 | 2tascFv-AFc-3 Chain1: |
| | EVQLVESGGGLVKPGGSLKLSCAASGYTFTSYVMHWVRQAPGKGLEWIGYINPYNDGTKYNEKFQGRVTISSDKSISTAYMELS |
| | SLRSEDTAMYYCARGTYYYGTRVFDYWGQGTLVTVSSGGSGGSGGSGGSGGSGGSDIVMTQSPATLSLSPGERATLSCRSSKSL |
| | QNVNGNTYLYWFQQKPGQSPQLLIYRMSNLNSGVPDRFSGSGSGTEFTLTISSLEPEDFAVYYCMQHLEYPITFGAGTKLEIKG |
| | GGGSDIQMTQTTSSLSASLGDRVTISCRASQDISNYLNWYQQKPDGTVKLLIYYTSRLHSGVPSRFSGSGSGTDYSLTINNLEQ |
| | EDIATYFCQQGNTRPWTFGGGTKLEIKGGSGGSGGSGGSGGSGGSGGSQVQLQQSGPELVKPGASVKMSCKASGYTFTDYVINW |
| | GKQRSGQGLEWIGEIYPGSGTNYYNEKFKAKATLTADKSSNIAYMQLSSLTSEDSAVYFCARRGRYGLYAMDYWGQGTSVTVSS |
| | DKTHTCPPCPAPEFEGGPSVFLFPPKPKDTLMISRTPEVTCVVVAVSHEDPEVKFNWYVDGVEVHNAKTKPREEQYGSTYRVVS |
| | VLTVLHQDWLNGKEYKCKVSNKALPAPIEKTISKAKGQPREPQVYTLPPSREEMTKNQVSLWCLVKGFYPSDIAVEWESNGQPE |
| | NNYKTTPPVLDSDGSFFLYSKLTVDKSRWQQGNVFSCSVMHEALHNHYTQKSLSLSPG |
| 274 | 2tascFv-AFc-3 Chain2: |
| | EVQLVESGGGLVKPGGSLKLSCAASGYTFTSYVMHWVRQAPGKGLEWIGYINPYNDGTKYNEKFQGRVTISSDKSISTAYMELS |
| | SLRSEDTAMYYCARGTYYYGTRVFDYWGQGTLVTVSSGGSGGSGGSGGSGGSGGSDIVMTQSPATLSLSPGERATLSCRSSKSL |
| | QNVNGNTYLYWFQQKPGQSPQLLIYRMSNLNSGVPDRFSGSGSGTEFTLTISSLEPEDFAVYYCMQHLEYPITFGAGTKLEIKG |
| | GGGSSYELTQPLSVSVALGQTARITCGGNNIGSKSVHWYQQKPGQAPVLVIYQDKKRPSGIPERFSGSNSGNTATLTISRAçAG |
| | DEADYYCQVWDDYIVLFGCGTKLTVLGGSGGSGGSGGSGGSGGSGGSQVQLVQSGAEVKKPGASVKVSCKASGYTFTNYYMQWV |
| | RQAPGQCLEWMGIINPSGGVTSYAQKFQGRVTMTRDTSTSTVYMELSSLRSEDTAVYYCARGSAYYYDFADYWGQGTLVTVSSD |
| | KTHTCPPCPAPEFEGGPSVFLFPPKPKDTLMISRTPEVTCVVVAVSHEDPEVKFNWYVDGVEVHNAKTKPREEQYGSTYRVVSV |
| | LTVLHQDWLNGKEYKCKVSNKALPAPIEKTISKAKGQPREPQVYTLPPSREEMTKNQVSLSCAVKGFYPSDIAVEWESNGQPEN |
| | NYKTTPPVLDSDGSFFLVSKLTVDKSRWQQGNVFSCSVMHEALHNHYTQKSLSLSPG |
| 275 | 2tascFv-AFc-4 Chain1: |
| | EVQLVESGGGLVKPGGSLKLSCAASGYTFTSYVMHWVRQAPGKGLEWIGYINPYNDGTKYNEKFQGRVTISSDKSISTAYMELS |
| | SLRSEDTAMYYCARGTYYYGTRVFDYWGQGTLVTVSSGGSGGSGGSGGSGGSGGSDIVMTQSPATLSLSPGERATLSCRSSKSL |
| | QNVNGNTYLYWFQQKPGQSPQLLIYRMSNLNSGVPDRFSGSGSGTEFTLTISSLEPEDFAVYYCMQHLEYPITFGAGTKLEIKG |
| | GGGSDIVMTQSPATLSVTPGDRVSLSCRASQSISDYLHWYQQKSHESPRLLIKYASQSISGIPSRFSGSGSGSDFTLSINSVEP |
| | EDVGVYYCQNGHSFPLTFGAGTKLELKGGSGGSGGSGGSGGSGGSGGSEVQLQQSGPELVKPGASVKISCKTSGYTFTEYTMHW |
| | VKQSHGKSLEWIGGISPNIGGTSYNQKFKGKATLTVDKSSSTAYMELRSLTSEDSAVYYCARRGGSFDYWGQGTTLTVSSDKTH |
| | TCPPCPAPEFEGGPSVFLFPPKPKDTLMISRTPEVTCVVVAVSHEDPEVKFNWYVDGVEVHNAKTKPREEQYGSTYRVVSVLTV |
| | LHQDWLNGKEYKCKVSNKALPAPIEKTISKAKGQPREPQVYTLPPSREEMTKNQVSLWCLVKGFYPSDIAVEWESNGQPENNYK |
| | TTPPVLDSDGSFFLYSKLTVDKSRWQQGNVFSCSVMHEALHNHYTQKSLSLSPG |
| 276 | 2tascFv-AFc-4 Chain2: |
| | EVQLVESGGGLVKPGGSLKLSCAASGYTFTSYVMHWVRQAPGKGLEWIGYINPYNDGTKYNEKFQGRVTISSDKSISTAYMELS |
| | SLRSEDTAMYYCARGTYYYGTRVFDYWGQGTLVTVSSGGSGGSGGSGGSGGSGGSDIVMTQSPATLSLSPGERATLSCRSSKSL |
| | QNVNGNTYLYWFQQKPGQSPQLLIYRMSNLNSGVPDRFSGSGSGTEFTLTISSLEPEDFAVYYCMQHLEYPITFGAGTKLEIKG |
| | GGGSSYELTQPLSVSVALGQTARITCGGNNIGSKSVHWYQQKPGQAPVLVIYQDKKRPSGIPERFSGSNSGNTATLTISRAQAG |
| | DEADYYCQVWDDYIVLFGCGTKLTVLGGSGGSGGSGGSGGSGGSGGSQVQLVQSGAEVKKPGASVKVSCKASGYTFTNYYMQWV |
| | RQAPGQCLEWMGIINPSGGVTSYAQKFQGRVTMTRDTSTSTVYMELSSLRSEDTAVYYCARGSAYYYDFADYWGQGTLVTVSSD |
| | KTHTCPPCPAPEFEGGPSVFLFPPKPKDTLMISRTPEVTCVVVAVSHEDPEVKFNWYVDGVEVHNAKTKPREEQYGSTYRVVSV |
| | LTVLHQDWLNGKEYKCKVSNKALPAPIEKTISKAKGQPREPQVYTLPPSREEMTKNQVSLSCAVKGFYPSDIAVEWESNGQPEN |
| | NYKTTPPVLDSDGSFFLVSKLTVDKSRWQQGNVFSCSVMHEALHNHYTQKSLSLSPG |
| 277 | 2tascFv-AFc-5 Chain1: |
| | EVQLQESGPGLVKPSETLSLTCTVSGGSVSSGSYYWSWIRQPPGKGLEWIGYIYYSGSTNYNPSLKSRVTISVDTSKNQFSLKL |
| | SSVTAADTAVYYCARNPISIPAFDIWGQGTMVTVSSGGSGGSGGSGGSGGSGGSQPVLTQPPSVSVAPGKTARITCGGNNIGSK |
| | SVHWYQQKPGQAPVLVIYYDSDRPSGIPERFSGSNSGNTATLTISRVEAGDEADYYCQVWDTSSDHVLFGGGTKLTVLGGGGSQ |
| | SALTQPASVSGSPGQSITISCSGSSSNIGNNAVNWYQQLPGKAPKLLIYYDDLLPSGVSDRFSGSKSGTSAFLAISGLQSEDEA |
| | DYYCAAWDDSLNGPVFGGGTKLTVLGGSGGSGGSGGSGGSGGSGGSQVQLVESGGGLVKPGGSLRLSCAASGFTFSSYGMHWVR |
| | QAPGKGLEWVAFIRYDGSNKYYADSVKGRFTISRDNSKNTLYLQMNSLRAEDTAVYYCAKDRGLGDGTYFDYWGQGTTVTVSSD |
| | KTHTCPPCPAPEFEGGPSVFLFPPKPKDTLMISRTPEVTCVVVAVSHEDPEVKFNWYVDGVEVHNAKTKPREEQYGSTYRVVSV |
| | LTVLHQDWLNGKEYKCKVSNKALPAPIEKTISKAKGQPREPQVYTLPPSREEMTKNQVSLWCLVKGFYPSDIAVEWESNGQPEN |
| | NYKTTPPVLDSDGSFFLYSKLTVDKSRWQQGNVFSCSVMHEALHNHYTQKSLSLSPG |
| 278 | 2tascFv-AFc-5 Chain2: |
| | EVQLQESGPGLVKPSETLSLTCTVSGGSVSSGSYYWSWIRQPPGKGLEWIGYIYYSGSTNYNPSLKSRVTISVDTSKNQFSLKL |
| | SSVTAADTAVYYCARNPISIPAFDIWGQGTMVTVSSGGSGGSGGSGGSGGSGGSQPVLTQPPSVSVAPGKTARITCGGNNIGSK |
| | SVHWYQQKPGQAPVLVIYYDSDRPSGIPERFSGSNSGNTATLTISRVEAGDEADYYCQVWDTSSDHVLFGGGTKLTVLGGGGSS |
| | YELTQPLSVSVALGQTARITCGGNNIGSKSVHWYQQKPGQAPVLVIYQDKKRPSGIPERFSGSNSGNTATLTISRAQAGDEADY |
| | YCQVWDDYIVLFGCGTKLTVLGGSGGSGGSGGSGGSGGSGGSQVQLVQSGAEVKKPGASVKVSCKASGYTFTNYYMQWVRQAPG |
| | QCLEWMGIINPSGGVTSYAQKFQGRVTMTRDTSTSTVYMELSSLRSEDTAVYYCARGSAYYYDFADYWGQGTLVTVSSDKTHTC |
| | PPCPAPEFEGGPSVFLFPPKPKDTLMISRTPEVTCVVVAVSHEDPEVKFNWYVDGVEVHNAKTKPREEQYGSTYRVVSVLTVLH |
| | QDWLNGKEYKCKVSNKALPAPIEKTISKAKGQPREPQVYTLPPSREEMTKNQVSLSCAVKGFYPSDIAVEWESNGQPENNYKTT |
| | PPVLDSDGSFFLVSKLTVDKSRWQQGNVFSCSVMHEALHNHYTQKSLSLSPG |
| 279 | 2tascFv-AFc-6 Chain1: |
| | EVQLQESGPGLVKPSETLSLTCTVSGGSVSSGSYYWSWIRQPPGKGLEWIGYIYYSGSTNYNPSLKSRVTISVDTSKNQFSLKL |
| | SSVTAADTAVYYCARNPISIPAFDIWGQGTMVTVSSGGSGGSGGSGGSGGSGGSQPVLTQPPSVSVAPGKTARITCGGNNIGSK |
| | SVHWYQQKPGQAPVLVIYYDSDRPSGIPERFSGSNSGNTATLTISRVEAGDEADYYCQVWDTSSDHVLFGGGTKLTVLGGGGSD |
| | IQMTQSPSTLSASVGDRVTITCRASQSISSWLAWYQQKPGKAPKLLIYKASSLESGVPSRFSGSGSGTEFTLTISSLQPDDFAT |
| | YYCQQYNSYPTFGGGTKVEIKGGSGGSGGSGGSGGSGGSGGSQVQLQQWGAGLLKPSETLSLTCAVYGGSFSGYYWSWIRQPPG |
| | KGLEWIGEIDHSGSTNYNPSLKSRVTISVDTSKNQFSLKLSSVTAADTAVYYCARARGPWSFDPWGQGTLVTVSSDKTHTCPPC |
| | PAPEFEGGPSVFLFPPKPKDTLMISRTPEVTCVVVAVSHEDPEVKFNWYVDGVEVHNAKTKPREEQYGSTYRVVSVLTVLHQDW |
| | LNGKEYKCKVSNKALPAPIEKTISKAKGQPREPQVYTLPPSREEMTKNQVSLWCLVKGFYPSDIAVEWESNGQPENNYKTTPPV |
| | LDSDGSFFLYSKLTVDKSRWQQGNVFSCSVMHEALHNHYTQKSLSLSPG |
| 280 | 2tascFv-AFc-6 Chain2: |
| | EVQLQESGPGLVKPSETLSLTCTVSGGSVSSGSYYWSWIRQPPGKGLEWIGYIYYSGSTNYNPSLKSRVTISVDTSKNQFSLKI |
| | SSVTAADTAVYYCARNPISIPAFDIWGQGTMVTVSSGGSGGSGGSGGSGGSGGSQPVLTQPPSVSVAPGKTARITCGGNNIGSK |
| | SVHWYQQKPGQAPVLVIYYDSDRPSGIPERFSGSNSGNTATLTISRVEAGDEADYYCQVWDTSSDHVLFGGGTKLTVLGGGGSS |
| | YELTQPLSVSVALGQTARITCGGNNIGSKSVHWYQQKPGQAPVLVIYQDKKRPSGIPERFSGSNSGNTATLTISRAQAGDEADY |
| | YCQVWDDYIVLFGCGTKLTVLGGSGGSGGSGGSGGSGGSGGSQVQLVQSGAEVKKPGASVKVSCKASGYTFTNYYMQWVRQAPG |
| | QCLEWMGIINPSGGVTSYAQKFQGRVTMTRDTSTSTVYMELSSLRSEDTAVYYCARGSAYYYDFADYWGQGTLVTVSSDKTHTC |
| | PPCPAPEFEGGPSVFLFPPKPKDTLMISRTPEVTCVVVAVSHEDPEVKFNWYVDGVEVHNAKTKPREEQYGSTYRVVSVLTVLH |
| | QDWLNGKEYKCKVSNKALPAPIEKTISKAKGQPREPQVYTLPPSREEMTKNQVSLSCAVKGFYPSDIAVEWESNGQPENNYKTT |
| | PPVLDSDGSFFLVSKLTVDKSRWQQGNVFSCSVMHEALHNHYTQKSLSLSPG |
| 281 | 2tascFv-AFc-7 Chain1: |
| | EVQLQESGPGLVKPSETLSLTCTVSGGSVSSGSYYWSWIRQPPGKGLEWIGYIYYSGSTNYNPSLKSRVTISVDTSKNQFSLKL |
| | SSVTAADTAVYYCARNPISIPAFDIWGQGTMVTVSSGGSGGSGGSGGSGGSGGSQPVLTQPPSVSVAPGKTARITCGGNNIGSK |
| | SVHWYQQKPGQAPVLVIYYDSDRPSGIPERFSGSNSGNTATLTISRVEAGDEADYYCQVWDTSSDHVLFGGGTKLTVLGGGGSD |
| | IQMTQTTSSLSASLGDRVTISCRASQDISNYLNWYQQKPDGTVKLLIYYTSRLHSGVPSRFSGSGSGTDYSLTINNLEQEDIAT |
| | YFCQQGNTRPWTFGGGTKLEIKGGSGGSGGSGGSGGSGGSGGSQVQLQQSGPELVKPGASVKMSCKASGYTFTDYVINWGKQRS |
| | GQGLEWIGEIYPGSGTNYYNEKFKAKATLTADKSSNIAYMQLSSLTSEDSAVYFCARRGRYGLYAMDYWGQGTSVTVSSDKTHT |
| | CPPCPAPEFEGGPSVFLFPPKPKDTLMISRTPEVTCVVVAVSHEDPEVKFNWYVDGVEVHNAKTKPREEQYGSTYRVVSVLTVL |
| | HQDWLNGKEYKCKVSNKALPAPIEKTISKAKGQPREPQVYTLPPSREEMTKNQVSLWCLVKGFYPSDIAVEWESNGQPENNYKT |
| | TPPVLDSDGSFFLYSKLTVDKSRWQQGNVFSCSVMHEALHNHYTQKSLSLSPG |
| 282 | 2tascFv-AFc-7 Chain2: |
| | EVQLQESGPGLVKPSETLSLTCTVSGGSVSSGSYYWSWIRQPPGKGLEWIGYIYYSGSTNYNPSLKSRVTISVDTSKNQFSLKL |
| | SSVTAADTAVYYCARNPISIPAFDIWGQGTMVTVSSGGSGGSGGSGGSGGSGGSQPVLTQPPSVSVAPGKTARITCGGNNIGSK |
| | SVHWYQQKPGQAPVLVIYYDSDRPSGIPERFSGSNSGNTATLTISRVEAGDEADYYCQVWDTSSDHVLFGGGTKLTVLGGGGSS |
| | YELTQPLSVSVALGQTARITCGGNNIGSKSVHWYQQKPGQAPVLVIYQDKKRPSGIPERFSGSNSGNTATLTISRAQAGDEADY |
| | YCQVWDDYIVLFGCGTKLTVLGGSGGSGGSGGSGGSGGSGGSQVQLVQSGAEVKKPGASVKVSCKASGYTFTNYYMQWVRQAPG |
| | QCLEWMGIINPSGGVTSYAQKFQGRVTMTRDTSTSTVYMELSSLRSEDTAVYYCARGSAYYYDFADYWGQGTLVTVSSDKTHTC |
| | PPCPAPEFEGGPSVFLFPPKPKDTLMISRTPEVTCVVVAVSHEDPEVKFNWYVDGVEVHNAKTKPREEQYGSTYRVVSVLTVLH |
| | QDWLNGKEYKCKVSNKALPAPIEKTISKAKGQPREPQVYTLPPSREEMTKNQVSLSCAVKGFYPSDIAVEWESNGQPENNYKTT |
| | PPVLDSDGSFFLVSKLTVDKSRWQQGNVFSCSVMHEALHNHYTQKSLSLSPG |
| 283 | 2tascFv-AFc-8 Chain1: |
| | EVQLQESGPGLVKPSETLSLTCTVSGGSVSSGSYYWSWIRQPPGKGLEWIGYIYYSGSTNYNPSLKSRVTISVDTSKNQFSLKL |
| | SSVTAADTAVYYCARNPISIPAFDIWGQGTMVTVSSGGSGGSGGSGGSGGSGGSQPVLTQPPSVSVAPGKTARITCGGNNIGSK |
| | SVHWYQQKPGQAPVLVIYYDSDRPSGIPERFSGSNSGNTATLTISRVEAGDEADYYCQVWDTSSDHVLFGGGTKLTVLGGGGSD |
| | IVMTQSPATLSVTPGDRVSLSCRASQSISDYLHWYQQKSHESPRLLIKYASQSISGIPSRFSGSGSGSDFTLSINSVEPEDVGV |
| | YYCQNGHSFPLTFGAGTKLELKGGSGGSGGSGGSGGSGGSGGSEVQLQQSGPELVKPGASVKISCKTSGYTFTEYTMHWVKQSH |
| | GKSLEWIGGISPNIGGTSYNQKFKGKATLTVDKSSSTAYMELRSLTSEDSAVYYCARRGGSFDYWGQGTTLTVSSDKTHTCPPC |
| | PAPEFEGGPSVFLFPPKPKDTLMISRTPEVTCVVVAVSHEDPEVKFNWYVDGVEVHNAKTKPREEQYGSTYRVVSVLTVLHQDW |
| | LNGKEYKCKVSNKALPAPIEKTISKAKGQPREPQVYTLPPSREEMTKNQVSLWCLVKGFYPSDIAVEWESNGQPENNYKTTPPV |
| | LDSDGSFFLYSKLTVDKSRWQQGNVFSCSVMHEALHNHYTQKSLSLSPG |
| 284 | 2tascFv-AFc-8 Chain2: |
| | EVQLQESGPGLVKPSETLSLTCTVSGGSVSSGSYYWSWIRQPPGKGLEWIGYIYYSGSTNYNPSLKSRVTISVDTSKNQFSLKI |
| | SSVTAADTAVYYCARNPISIPAFDIWGQGTMVTVSSGGSGGSGGSGGSGGSGGSQPVLTQPPSVSVAPGKTARITCGGNNIGSK |
| | SVHWYQQKPGQAPVLVIYYDSDRPSGIPERFSGSNSGNTATLTISRVEAGDEADYYCQVWDTSSDHVLFGGGTKLTVLGGGGSS |
| | YELTQPLSVSVALGQTARITCGGNNIGSKSVHWYQQKPGQAPVLVIYQDKKRPSGIPERFSGSNSGNTATLTISRAQAGDEADY |
| | YCQVWDDYIVLFGCGTKLTVLGGSGGSGGSGGSGGSGGSGGSQVQLVQSGAEVKKPGASVKVSCKASGYTFTNYYMQWVRQAPG |
| | QCLEWMGIINPSGGVTSYAQKFQGRVTMTRDTSTSTVYMELSSLRSEDTAVYYCARGSAYYYDFADYWGQGTLVTVSSDKTHTC |
| | PPCPAPEFEGGPSVFLFPPKPKDTLMISRTPEVTCVVVAVSHEDPEVKFNWYVDGVEVHNAKTKPREEQYGSTYRVVSVLTVLH |
| | QDWLNGKEYKCKVSNKALPAPIEKTISKAKGQPREPQVYTLPPSREEMTKNQVSLSCAVKGFYPSDIAVEWESNGQPENNYKTT |
| | PPVLDSDGSFFLVSKLTVDKSRWQQGNVFSCSVMHEALHNHYTQKSLSLSPG |
| 285 | 1tascFv-1scFv-AFc-1 Chain1: |
| | EVQLVESGGGLVKPGGSLKLSCAASGYTFTSYVMHWVRQAPGKGLEWIGYINPYNDGTKYNEKFQGRVTISSDKSISTAYMELS |
| | SLRSEDTAMYYCARGTYYYGTRVFDYWGQGTLVTVSSGGSGGSGGSGGSGGSGGSDIVMTQSPATLSLSPGERATLSCRSSKSL |
| | QNVNGNTYLYWFQQKPGQSPQLLIYRMSNLNSGVPDRFSGSGSGTEFTLTISSLEPEDFAVYYCMQHLEYPITFGAGTKLEIKG |
| | GGGSQSALTQPASVSGSPGQSITISCSGSSSNIGNNAVNWYQQLPGKAPKLLIYYDDLLPSGVSDRFSGSKSGTSAFLAISGLQ |
| | SEDEADYYCAAWDDSLNGPVFGGGTKLTVLGGSGGSGGSGGSGGSGGSGGSQVQLVESGGGLVKPGGSLRLSCAASGFTFSSYG |
| | MHWVRQAPGKGLEWVAFIRYDGSNKYYADSVKGRFTISRDNSKNTLYLQMNSLRAEDTAVYYCAKDRGLGDGTYFDYWGQGTTV |
| | TVSSDKTHTCPPCPAPELLGGPSVFLFPPKPKDTLMISRTPEVTCVVVDVSHEDPEVKFNWYVDGVEVHNAKTKPREEQYNSTY |
| | RVVSVLTVLHQDWLNGKEYKCKVSNKALPAPIEKTISKAKGQPREPQVYTLPPSREEMTKNQVSLWCLVKGFYPSDIAVEWESN |
| | GQPENNYKTTPPVLDSDGSFFLYSKLTVDKSRWQQGNVFSCSVMHEALHNHYTQKSLSLSPG |
| 286 | 1tascFv-1scFv-AFc-1 Chain2: |
| | EVQLVESGGGLVKPGGSLKLSCAASGYTFTSYVMHWVRQAPGKGLEWIGYINPYNDGTKYNEKFQGRVTISSDKSISTAYMELS |
| | SLRSEDTAMYYCARGTYYYGTRVFDYWGQGTLVTVSSGGSGGSGGSGGSGGSGGSDIVMTQSPATLSLSPGERATLSCRSSKSL |
| | QNVNGNTYLYWFQQKPGQSPQLLIYRMSNLNSGVPDRFSGSGSGTEFTLTISSLEPEDFAVYYCMQHLEYPITFGAGTKLEIKD |
| | KTHTCPPCPAPELLGGPSVFLFPPKPKDTLMISRTPEVTCVVVDVSHEDPEVKFNWYVDGVEVHNAKTKPREEQYNSTYRVVSV |
| | LTVLHQDWLNGKEYKCKVSNKALPAPIEKTISKAKGQPREPQVYTLPPSREEMTKNQVSLSCAVKGFYPSDIAVEWESNGQPEN |
| | NYKTTPPVLDSDGSFFLVSKLTVDKSRWQQGNVFSCSVMHEALHNHYTQKSLSLSPG |
| 287 | 1tascFv-1scFv-AFc-2 Chain1: |
| | EVQLVESGGGLVKPGGSLKLSCAASGYTFTSYVMHWVRQAPGKGLEWIGYINPYNDGTKYNEKFQGRVTISSDKSISTAYMELS |
| | SLRSEDTAMYYCARGTYYYGTRVFDYWGQGTLVTVSSGGSGGSGGSGGSGGSGGSDIVMTQSPATLSLSPGERATLSCRSSKSL |
| | QNVNGNTYLYWFQQKPGQSPQLLIYRMSNLNSGVPDRFSGSGSGTEFTLTISSLEPEDFAVYYCMQHLEYPITFGAGTKLEIKG |
| | GGGSDIQMTQSPSTLSASVGDRVTITCRASQSISSWLAWYQQKPGKAPKLLIYKASSLESGVPSRFSGSGSGTEFTLTISSLQP |
| | DDFATYYCQQYNSYPTFGGGTKVEIKGGSGGSGGSGGSGGSGGSGGSQVQLQQWGAGLLKPSETLSLTCAVYGGSFSGYYWSWI |
| | RQPPGKGLEWIGEIDHSGSTNYNPSLKSRVTISVDTSKNQFSLKLSSVTAADTAVYYCARARGPWSFDPWGQGTLVTVSSDKTH |
| | TCPPCPAPELLGGPSVFLFPPKPKDTLMISRTPEVTCVVVDVSHEDPEVKFNWYVDGVEVHNAKTKPREEQYNSTYRVVSVLTV |
| | LHQDWLNGKEYKCKVSNKALPAPIEKTISKAKGQPREPQVYTLPPSREEMTKNQVSLWCLVKGFYPSDIAVEWESNGQPENNYK |
| | TTPPVLDSDGSFFLYSKLTVDKSRWQQGNVFSCSVMHEALHNHYTQKSLSLSPG |
| 288 | 1tascFv-1scFv-AFc-2 Chain2: |
| | EVQLVESGGGLVKPGGSLKLSCAASGYTFTSYVMHWVRQAPGKGLEWIGYINPYNDGTKYNEKFQGRVTISSDKSISTAYMELS |
| | SLRSEDTAMYYCARGTYYYGTRVFDYWGQGTLVTVSSGGSGGSGGSGGSGGSGGSDIVMTQSPATLSLSPGERATLSCRSSKSL |
| | QNVNGNTYLYWFQQKPGQSPQLLIYRMSNLNSGVPDRFSGSGSGTEFTLTISSLEPEDFAVYYCMQHLEYPITFGAGTKLEIKD |
| | KTHTCPPCPAPELLGGPSVFLFPPKPKDTLMISRTPEVTCVVVDVSHEDPEVKFNWYVDGVEVHNAKTKPREEQYNSTYRVVSV |
| | LTVLHQDWLNGKEYKCKVSNKALPAPIEKTISKAKGQPREPQVYTLPPSREEMTKNQVSLSCAVKGFYPSDIAVEWESNGQPEN |
| | NYKTTPPVLDSDGSFFLVSKLTVDKSRWQQGNVFSCSVMHEALHNHYTQKSLSLSPG |
| 289 | 1tascFv-1scFv-AFc-3 Chain1: |
| | EVQLVESGGGLVKPGGSLKLSCAASGYTFTSYVMHWVRQAPGKGLEWIGYINPYNDGTKYNEKFQGRVTISSDKSISTAYMELS |
| | SLRSEDTAMYYCARGTYYYGTRVFDYWGQGTLVTVSSGGSGGSGGSGGSGGSGGSDIVMTQSPATLSLSPGERATLSCRSSKSL |
| | QNVNGNTYLYWFQQKPGQSPQLLIYRMSNLNSGVPDRFSGSGSGTEFTLTISSLEPEDFAVYYCMQHLEYPITFGAGTKLEIKG |
| | GGGSDIQMTQTTSSLSASLGDRVTISCRASQDISNYLNWYQQKPDGTVKLLIYYTSRLHSGVPSRFSGSGSGTDYSLTINNLEQ |
| | EDIATYFCQQGNTRPWTFGGGTKLEIKGGSGGSGGSGGSGGSGGSGGSQVQLQQSGPELVKPGASVKMSCKASGYTFTDYVINW |
| | GKQRSGQGLEWIGEIYPGSGTNYYNEKFKAKATLTADKSSNIAYMQLSSLTSEDSAVYFCARRGRYGLYAMDYWGQGTSVTVSS |
| | DKTHTCPPCPAPELLGGPSVFLFPPKPKDTLMISRTPEVTCVVVDVSHEDPEVKFNWYVDGVEVHNAKTKPREEQYNSTYRVVS |
| | VLTVLHQDWLNGKEYKCKVSNKALPAPIEKTISKAKGQPREPQVYTLPPSREEMTKNQVSLWCLVKGFYPSDIAVEWESNGQPE |
| | NNYKTTPPVLDSDGSFFLYSKLTVDKSRWQQGNVFSCSVMHEALHNHYTQKSLSLSPG |
| 290 | 1tascFv-1scFv-AFc-3 Chain2: |
| | EVQLVESGGGLVKPGGSLKLSCAASGYTFTSYVMHWVRQAPGKGLEWIGYINPYNDGTKYNEKFQGRVTISSDKSISTAYMELS |
| | SLRSEDTAMYYCARGTYYYGTRVFDYWGQGTLVTVSSGGSGGSGGSGGSGGSGGSDIVMTQSPATLSLSPGERATLSCRSSKSL |
| | QNVNGNTYLYWFQQKPGQSPQLLIYRMSNLNSGVPDRFSGSGSGTEFTLTISSLEPEDFAVYYCMQHLEYPITFGAGTKLEIKD |
| | KTHTCPPCPAPELLGGPSVFLFPPKPKDTLMISRTPEVTCVVVDVSHEDPEVKFNWYVDGVEVHNAKTKPREEQYNSTYRVVSV |
| | LTVLHQDWLNGKEYKCKVSNKALPAPIEKTISKAKGQPREPQVYTLPPSREEMTKNQVSLSCAVKGFYPSDIAVEWESNGQPEN |
| | NYKTTPPVLDSDGSFFLVSKLTVDKSRWQQGNVFSCSVMHEALHNHYTQKSLSLSPG |
| 291 | 1tascFv-1scFv-AFc-4 Chain1: |
| | EVQLVESGGGLVKPGGSLKLSCAASGYTFTSYVMHWVRQAPGKGLEWIGYINPYNDGTKYNEKFQGRVTISSDKSISTAYMELS |
| | SLRSEDTAMYYCARGTYYYGTRVFDYWGQGTLVTVSSGGSGGSGGSGGSGGSGGSDIVMTQSPATLSLSPGERATLSCRSSKSL |
| | QNVNGNTYLYWFQQKPGQSPQLLIYRMSNLNSGVPDRFSGSGSGTEFTLTISSLEPEDFAVYYCMQHLEYPITFGAGTKLEIKG |
| | GGGSDIVMTQSPATLSVTPGDRVSLSCRASQSISDYLHWYQQKSHESPRLLIKYASQSISGIPSRFSGSGSGSDFTLSINSVEP |
| | EDVGVYYCQNGHSFPLTFGAGTKLELKGGSGGSGGSGGSGGSGGSGGSEVQLQQSGPELVKPGASVKISCKTSGYTFTEYTMHW |
| | VKQSHGKSLEWIGGISPNIGGTSYNQKFKGKATLTVDKSSSTAYMELRSLTSEDSAVYYCARRGGSFDYWGQGTTLTVSSDKTH |
| | TCPPCPAPELLGGPSVFLFPPKPKDTLMISRTPEVTCVVVDVSHEDPEVKFNWYVDGVEVHNAKTKPREEQYNSTYRVVSVLTV |
| | LHQDWLNGKEYKCKVSNKALPAPIEKTISKAKGQPREPQVYTLPPSREEMTKNQVSLWCLVKGFYPSDIAVEWESNGQPENNYK |
| | TTPPVLDSDGSFFLYSKLTVDKSRWQQGNVFSCSVMHEALHNHYTQKSLSLSPG |
| 292 | 1tascFv-1scFv-AFc-4 Chain2: |
| | EVQLVESGGGLVKPGGSLKLSCAASGYTFTSYVMHWVRQAPGKGLEWIGYINPYNDGTKYNEKFQGRVTISSDKSISTAYMELS |
| | SLRSEDTAMYYCARGTYYYGTRVFDYWGQGTLVTVSSGGSGGSGGSGGSGGSGGSDIVMTQSPATLSLSPGERATLSCRSSKSL |
| | QNVNGNTYLYWFQQKPGQSPQLLIYRMSNLNSGVPDRFSGSGSGTEFTLTISSLEPEDFAVYYCMQHLEYPITFGAGTKLEIKD |
| | KTHTCPPCPAPELLGGPSVFLFPPKPKDTLMISRTPEVTCVVVDVSHEDPEVKFNWYVDGVEVHNAKTKPREEQYNSTYRVVSV |
| | LTVLHQDWLNGKEYKCKVSNKALPAPIEKTISKAKGQPREPQVYTLPPSREEMTKNQVSLSCAVKGFYPSDIAVEWESNGQPEN |
| | NYKTTPPVLDSDGSFFLVSKLTVDKSRWQQGNVFSCSVMHEALHNHYTQKSLSLSPG |
| 293 | 1scDb-2Fab-AFc-1 Chain1: |
| | EVQLVESGGGLVKPGGSLKLSCAASGYTFTSYVMHWVRQAPGKGLEWIGYINPYNDGTKYNEKFQGRVTISSDKSISTAYMELS |
| | SLRSEDTAMYYCARGTYYYGTRVFDYWGQGTLVTVSSGGSGGSGGSDIVMTQSPATLSLSPGERATLSCRSSKSLQNVNGNTYL |
| | YWFQQKPGQSPQLLIYRMSNLNSGVPDRFSGSGSGTEFTLTISSLEPEDFAVYYCMQHLEYPITFGAGTKLEIKGGSGGSGGSG |
| | GSGGSGGSGGSEVQLVESGGGLVKPGGSLKLSCAASGYTFTSYVMHWVRQAPGKGLEWIGYINPYNDGTKYNEKFQGRVTISSD |
| | KSISTAYMELSSLRSEDTAMYYCARGTYYYGTRVFDYWGQGTLVTVSSGGSGGSGGSDIVMTQSPATLSLSPGERATLSCRSSK |
| | SLQNVNGNTYLYWFQQKPGQSPQLLIYRMSNLNSGVPDRFSGSGSGTEFTLTISSLEPEDFAVYYCMQHLEYPITFGAGTKLEI |
| | KDKTHTCPPCPAPEFEGGPSVFLFPPKPKDTLMISRTPEVTCVVVAVSHEDPEVKFNWYVDGVEVHNAKTKPREEQYGSTYRVV |
| | SVLTVLHQDWLNGKEYKCKVSNKALPAPIEKTISKAKGQPREPQVYTLPPSREEMTKNQVSLWCLVKGFYPSDIAVEWESNGQP |
| | ENNYKTTPPVLDSDGSFFLYSKLTVDKSRWQQGNVFSCSVMHEALHNHYTQKSLSLSPG |
| 294 | 1scDb-2Fab-AFc-1 Chain2: |
| | EVQLVESGGGLVKPGGSLRLSCAASGFTFSSYGMHWVRQAPGKGLEWVAFIRYDGSNKYYADSVKGRFTISRDNSKNTLYLQMN |
| | SLRAEDTAVYYCAKDRGLGDGTYFDYWGQGTTVTVSSASTKGPSVFPLAPSSKSTSGGTAALGCLVKDYFPEPVTVSWNSGALT |
| | SGVHTFPAVLQSSGLYSLSSVVTVPSSSLGTQTYICNVNHKPSNTKVDKKVEPKSCDKTHTQVQLVQSGAEVKKPGASVKVSCK |
| | ASGYTFTNYYMQWVRQAPGQGLEWMGIINPSGGVTSYAQKFQGRVTMTRDTSTSTVYMELSSLRSEDTAVYYCARGSAYYYDFA |
| | DYWGQGTLVTVSSASTKGPSVFPLAPSSKSTSGGTAALGCLVKDYFPEPVTVSWNSGALTSGVHTFPAVLQSSGLYSLSSVVTV |
| | PSSSLGTQTYICNVNHKPSNTKVDKKVEPKSCDKTHTCPPCPAPEFEGGPSVFLFPPKPKDTLMISRTPEVTCVVVAVSHEDPE |
| | VKFNWYVDGVEVHNAKTKPREEQYGSTYRVVSVLTVLHQDWLNGKEYKCKVSNKALPAPIEKTISKAKGQPREPQVYTLPPSRE |
| | EMTKNQVSLSCAVKGFYPSDIAVEWESNGQPENNYKTTPPVLDSDGSFFLVSKLTVDKSRWQQGNVFSCSVMHEALHNHYTQKS |
| | LSLSPG |
| 295 | 1scDb-2Fab-AFc-1 Chain3: |
| | QSALTQPASVSGSPGQSITISCSGSSSNIGNNAVNWYQQLPGKAPKLLIYYDDLLPSGVSDRFSGSKSGTSAFLAISGLQSEDE |
| | ADYYCAAWDDSLNGPVFGGGTKLTVLGQPKAAPSVTLFPPSSEELQANKATLVCLISDFYPGAVTVAWKADSSPVKAGVETTTP |
| | SKQSNNKYAASSYLSLTPEQWKSHRSYSCQVTHEGSTVEKTVAPTECSGGGGSSYELTQPLSVSVALGQTARITCGGNNIGSKS |
| | VHWYQQKPGQAPVLVIYQDKKRPSGIPERFSGSNSGNTATLTISRAQAGDEADYYCQVWDDYIVLFGGGTKLTVLGQPKAAPSV |
| | TLFPPSSEELQANKATLVCLISDFYPGAVTVAWKADSSPVKAGVETTTPSKQSNNKYAASSYLSLTPEQWKSHRSYSCQVTHEG |
| | STVEKTVAPTECS |
| 296 | 1scDb-2Fab-AFc-2 Chain1: |
| | EVQLVESGGGLVKPGGSLKLSCAASGYTFTSYVMHWVRQAPGKGLEWIGYINPYNDGTKYNEKFQGRVTISSDKSISTAYMELS |
| | SLRSEDTAMYYCARGTYYYGTRVFDYWGQGTLVTVSSGGSGGSGGSDIVMTQSPATLSLSPGERATLSCRSSKSLQNVNGNTYL |
| | YWFQQKPGQSPQLLIYRMSNLNSGVPDRFSGSGSGTEFTLTISSLEPEDFAVYYCMQHLEYPITFGAGTKLEIKGGSGGSGGSG |
| | GSGGSGGSGGSEVQLVESGGGLVKPGGSLKLSCAASGYTFTSYVMHWVRQAPGKGLEWIGYINPYNDGTKYNEKFQGRVTISSD |
| | KSISTAYMELSSLRSEDTAMYYCARGTYYYGTRVFDYWGQGTLVTVSSGGSGGSGGSDIVMTQSPATLSLSPGERATLSCRSSK |
| | SLQNVNGNTYLYWFQQKPGQSPQLLIYRMSNLNSGVPDRFSGSGSGTEFTLTISSLEPEDFAVYYCMQHLEYPITFGAGTKLEI |
| | KDKTHTCPPCPAPEFEGGPSVFLFPPKPKDTLMISRTPEVTCVVVAVSHEDPEVKFNWYVDGVEVHNAKTKPREEQYGSTYRVV |
| | SVLTVLHQDWLNGKEYKCKVSNKALPAPIEKTISKAKGQPREPQVYTLPPSREEMTKNQVSLWCLVKGFYPSDIAVEWESNGQP |
| | ENNYKTTPPVLDSDGSFFLYSKLTVDKSRWQQGNVFSCSVMHEALHNHYTQKSLSLSPG |
| 297 | 1scDb-2Fab-AFc-2 Chain2: |
| | EVQLQQWGAGLLKPSETLSLTCAVYGGSFSGYYWSWIRQPPGKGLEWIGEIDHSGSTNYNPSLKSRVTISVDTSKNQFSLKLSS |
| | VTAADTAVYYCARARGPWSFDPWGQGTLVTVSSASTKGPSVFPLAPSSKSTSGGTAALGCLVKDYFPEPVTVSWNSGALTSGVH |
| | TFPAVLQSSGLYSLSSVVTVPSSSLGTQTYICNVNHKPSNTKVDKKVEPKSCDKTHTQVQLVQSGAEVKKPGASVKVSCKASGY |
| | TFTNYYMQWVRQAPGQGLEWMGIINPSGGVTSYAQKFQGRVTMTRDTSTSTVYMELSSLRSEDTAVYYCARGSAYYYDFADYWG |
| | QGTLVTVSSASTKGPSVFPLAPSSKSTSGGTAALGCLVKDYFPEPVTVSWNSGALTSGVHTFPAVLQSSGLYSLSSVVTVPSSS |
| | LGTQTYICNVNHKPSNTKVDKKVEPKSCDKTHTCPPCPAPEFEGGPSVFLFPPKPKDTLMISRTPEVTCVVVAVSHEDPEVKFN |
| | WYVDGVEVHNAKTKPREEQYGSTYRVVSVLTVLHQDWLNGKEYKCKVSNKALPAPIEKTISKAKGQPREPQVYTLPPSREEMTK |
| | NQVSLSCAVKGFYPSDIAVEWESNGQPENNYKTTPPVLDSDGSFFLVSKLTVDKSRWQQGNVFSCSVMHEALHNHYTQKSLSLS |
| | PG |
| 298 | 1scDb-2Fab-AFc-2 Chain3: |
| | DIQMTQSPSTLSASVGDRVTITCRASQSISSWLAWYQQKPGKAPKLLIYKASSLESGVPSRFSGSGSGTEFTLTISSLQPDDFA |
| | TYYCQQYNSYPTFGGGTKVEIKRTVAAPSVFIFPPSDEQLKSGTASVVCLLNNFYPREAKVQWKVDNALQSGNSQESVTEQDSK |
| | DSTYSLSSTLTLSKADYEKHKVYACEVTHQGLSSPVTKSFNRGECGGGGSSYELTQPLSVSVALGQTARITCGGNNIGSKSVHW |
| | YQQKPGQAPVLVIYQDKKRPSGIPERFSGSNSGNTATLTISRAQAGDEADYYCQVWDDYIVLFGGGTKLTVLGQPKAAPSVTLF |
| | PPSSEELQANKATLVCLISDFYPGAVTVAWKADSSPVKAGVETTTPSKQSNNKYAASSYLSLTPEQWKSHRSYSCQVTHEGSTV |
| | EKTVAPTECS |
| 299 | 1scDb-2Fab-AFc-3 Chain1: |
| | EVQLVESGGGLVKPGGSLKLSCAASGYTFTSYVMHWVRQAPGKGLEWIGYINPYNDGTKYNEKFQGRVTISSDKSISTAYMELS |
| | SLRSEDTAMYYCARGTYYYGTRVFDYWGQGTLVTVSSGGSGGSGGSDIVMTQSPATLSLSPGERATLSCRSSKSLQNVNGNTYL |
| | YWFQQKPGQSPQLLIYRMSNLNSGVPDRFSGSGSGTEFTLTISSLEPEDFAVYYCMQHLEYPITFGAGTKLEIKGGSGGSGGSG |
| | GSGGSGGSGGSEVQLVESGGGLVKPGGSLKLSCAASGYTFTSYVMHWVRQAPGKGLEWIGYINPYNDGTKYNEKFQGRVTISSD |
| | KSISTAYMELSSLRSEDTAMYYCARGTYYYGTRVFDYWGQGTLVTVSSGGSGGSGGSDIVMTQSPATLSLSPGERATLSCRSSK |
| | SLQNVNGNTYLYWFQQKPGQSPQLLIYRMSNLNSGVPDRFSGSGSGTEFTLTISSLEPEDFAVYYCMQHLEYPITFGAGTKLEI |
| | KDKTHTCPPCPAPEFEGGPSVFLFPPKPKDTLMISRTPEVTCVVVAVSHEDPEVKFNWYVDGVEVHNAKTKPREEQYGSTYRVV |
| | SVLTVLHQDWLNGKEYKCKVSNKALPAPIEKTISKAKGQPREPQVYTLPPSREEMTKNQVSLWCLVKGFYPSDIAVEWESNGQP |
| | ENNYKTTPPVLDSDGSFFLYSKLTVDKSRWQQGNVFSCSVMHEALHNHYTQKSLSLSPG |
| 300 | 1scDb-2Fab-AFc-3 Chain2: |
| | EVQLQQSGPELVKPGASVKMSCKASGYTFTDYVINWGKQRSGQGLEWIGEIYPGSGTNYYNEKFKAKATLTADKSSNIAYMQLS |
| | SLTSEDSAVYFCARRGRYGLYAMDYWGQGTSVTVSSASTKGPSVFPLAPSSKSTSGGTAALGCLVKDYFPEPVTVSWNSGALTS |
| | GVHTFPAVLQSSGLYSLSSVVTVPSSSLGTQTYICNVNHKPSNTKVDKKVEPKSCDKTHTQVQLVQSGAEVKKPGASVKVSCKA |
| | SGYTFTNYYMQWVRQAPGQGLEWMGIINPSGGVTSYAQKFQGRVTMTRDTSTSTVYMELSSLRSEDTAVYYCARGSAYYYDFAD |
| | YWGQGTLVTVSSASTKGPSVFPLAPSSKSTSGGTAALGCLVKDYFPEPVTVSWNSGALTSGVHTFPAVLQSSGLYSLSSVVTVP |
| | SSSLGTQTYICNVNHKPSNTKVDKKVEPKSCDKTHTCPPCPAPEFEGGPSVFLFPPKPKDTLMISRTPEVTCVVVAVSHEDPEV |
| | KFNWYVDGVEVHNAKTKPREEQYGSTYRVVSVLTVLHQDWLNGKEYKCKVSNKALPAPIEKTISKAKGQPREPQVYTLPPSREE |
| | MTKNQVSLSCAVKGFYPSDIAVEWESNGQPENNYKTTPPVLDSDGSFFLVSKLTVDKSRWQQGNVFSCSVMHEALHNHYTQKSL |
| | SLSPG |
| 301 | 1scDb-2Fab-AFc-3 Chain3: |
| | DIQMTQTTSSLSASLGDRVTISCRASQDISNYLNWYQQKPDGTVKLLIYYTSRLHSGVPSRFSGSGSGTDYSLTINNLEQEDIA |
| | TYFCQQGNTRPWTFGGGTKLEIKRTVAAPSVFIFPPSDEQLKSGTASVVCLLNNFYPREAKVQWKVDNALQSGNSQESVTEQDS |
| | KDSTYSLSSTLTLSKADYEKHKVYACEVTHQGLSSPVTKSFNRGECGGGGSSYELTQPLSVSVALGQTARITCGGNNIGSKSVH |
| | WYQQKPGQAPVLVIYQDKKRPSGIPERFSGSNSGNTATLTISRAQAGDEADYYCQVWDDYIVLFGGGTKLTVLGQPKAAPSVTL |
| | FPPSSEELQANKATLVCLISDFYPGAVTVAWKADSSPVKAGVETTTPSKQSNNKYAASSYLSLTPEQWKSHRSYSCQVTHEGST |
| | VEKTVAPTECS |
| 302 | 1scDb-2Fab-AFc-4 Chain1: |
| | EVQLVESGGGLVKPGGSLKLSCAASGYTFTSYVMHWVRQAPGKGLEWIGYINPYNDGTKYNEKFQGRVTISSDKSISTAYMELS |
| | SLRSEDTAMYYCARGTYYYGTRVFDYWGQGTLVTVSSGGSGGSGGSDIVMTQSPATLSLSPGERATLSCRSSKSLQNVNGNTYL |
| | YWFQQKPGQSPQLLIYRMSNLNSGVPDRFSGSGSGTEFTLTISSLEPEDFAVYYCMQHLEYPITFGAGTKLEIKGGSGGSGGSG |
| | GSGGSGGSGGSEVQLVESGGGLVKPGGSLKLSCAASGYTFTSYVMHWVRQAPGKGLEWIGYINPYNDGTKYNEKFQGRVTISSD |
| | KSISTAYMELSSLRSEDTAMYYCARGTYYYGTRVFDYWGQGTLVTVSSGGSGGSGGSDIVMTQSPATLSLSPGERATLSCRSSK |
| | SLQNVNGNTYLYWFQQKPGQSPQLLIYRMSNLNSGVPDRFSGSGSGTEFTLTISSLEPEDFAVYYCMQHLEYPITFGAGTKLEI |
| | KDKTHTCPPCPAPEFEGGPSVFLFPPKPKDTLMISRTPEVTCVVVAVSHEDPEVKFNWYVDGVEVHNAKTKPREEQYGSTYRVV |
| | SVLTVLHQDWLNGKEYKCKVSNKALPAPIEKTISKAKGQPREPQVYTLPPSREEMTKNQVSLWCLVKGFYPSDIAVEWESNGQP |
| | ENNYKTTPPVLDSDGSFFLYSKLTVDKSRWQQGNVFSCSVMHEALHNHYTQKSLSLSPG |
| 303 | 1scDb-2Fab-AFc-4 Chain2: |
| | EVQLQQSGPELVKPGASVKISCKTSGYTFTEYTMHWVKQSHGKSLEWIGGISPNIGGTSYNQKFKGKATLTVDKSSSTAYMELR |
| | SLTSEDSAVYYCARRGGSFDYWGQGTTLTVSSASTKGPSVFPLAPSSKSTSGGTAALGCLVKDYFPEPVTVSWNSGALTSGVHT |
| | FPAVLQSSGLYSLSSVVTVPSSSLGTQTYICNVNHKPSNTKVDKKVEPKSCDKTHTQVQLVQSGAEVKKPGASVKVSCKASGYT |
| | FTNYYMQWVRQAPGQGLEWMGIINPSGGVTSYAQKFQGRVTMTRDTSTSTVYMELSSLRSEDTAVYYCARGSAYYYDFADYWGQ |
| | GTLVTVSSASTKGPSVFPLAPSSKSTSGGTAALGCLVKDYFPEPVTVSWNSGALTSGVHTFPAVLQSSGLYSLSSVVTVPSSSL |
| | GTQTYICNVNHKPSNTKVDKKVEPKSCDKTHTCPPCPAPEFEGGPSVFLFPPKPKDTLMISRTPEVTCVVVAVSHEDPEVKFNW |
| | YVDGVEVHNAKTKPREEQYGSTYRVVSVLTVLHQDWLNGKEYKCKVSNKALPAPIEKTISKAKGQPREPQVYTLPPSREEMTKN |
| | QVSLSCAVKGFYPSDIAVEWESNGQPENNYKTTPPVLDSDGSFFLVSKLTVDKSRWQQGNVFSCSVMHEALHNHYTQKSLSLSP |
| | G |
| 304 | 1scDb-2Fab-AFc-4 Chain3: |
| | DIVMTQSPATLSVTPGDRVSLSCRASQSISDYLHWYQQKSHESPRLLIKYASQSISGIPSRFSGSGSGSDFTLSINSVEPEDVG |
| | VYYCQNGHSFPLTFGAGTKLELKRTVAAPSVFIFPPSDEQLKSGTASVVCLLNNFYPREAKVQWKVDNALQSGNSQESVTEQDS |
| | KDSTYSLSSTLTLSKADYEKHKVYACEVTHQGLSSPVTKSFNRGECGGGGSSYELTQPLSVSVALGQTARITCGGNNIGSKSVH |
| | WYQQKPGQAPVLVIYQDKKRPSGIPERFSGSNSGNTATLTISRAQAGDEADYYCQVWDDYIVLFGGGTKLTVLGQPKAAPSVTL |
| | FPPSSEELQANKATLVCLISDFYPGAVTVAWKADSSPVKAGVETTTPSKQSNNKYAASSYLSLTPEQWKSHRSYSCQVTHEGST |
| | VEKTVAPTECS |
| 305 | 1scDb-2Fab-AFc-5 Chain1: |
| | EVQLQESGPGLVKPSETLSLTCTVSGGSVSSGSYYWSWIRQPPGKGLEWIGYIYYSGSTNYNPSLKSRVTISVDTSKNQFSLKL |
| | SSVTAADTAVYYCARNPISIPAFDIWGQGTMVTVSSGGSGGSGGSQPVLTQPPSVSVAPGKTARITCGGNNIGSKSVHWYQQKP |
| | GQAPVLVIYYDSDRPSGIPERFSGSNSGNTATLTISRVEAGDEADYYCQVWDTSSDHVLFGGGTKLTVLGGSGGSGGSGGSGGS |
| | GGSGGSQVQLQESGPGLVKPSETLSLTCTVSGGSVSSGSYYWSWIRQPPGKGLEWIGYIYYSGSTNYNPSLKSRVTISVDTSKN |
| | QFSLKLSSVTAADTAVYYCARNPISIPAFDIWGQGTMVTVSSGGSGGSGGSQPVLTQPPSVSVAPGKTARITCGGNNIGSKSVH |
| | WYQQKPGQAPVLVIYYDSDRPSGIPERFSGSNSGNTATLTISRVEAGDEADYYCQVWDTSSDHVLFGGGTKLTVLDKTHTCPPC |
| | PAPEFEGGPSVFLFPPKPKDTLMISRTPEVTCVVVAVSHEDPEVKFNWYVDGVEVHNAKTKPREEQYGSTYRVVSVLTVLHQDW |
| | LNGKEYKCKVSNKALPAPIEKTISKAKGQPREPQVYTLPPSREEMTKNQVSLWCLVKGFYPSDIAVEWESNGQPENNYKTTPPV |
| | LDSDGSFFLYSKLTVDKSRWQQGNVFSCSVMHEALHNHYTQKSLSLSPG |
| 306 | 1scDb-2Fab-AFc-5 Chain2: |
| | EVQLVESGGGLVKPGGSLRLSCAASGFTFSSYGMHWVRQAPGKGLEWVAFIRYDGSNKYYADSVKGRFTISRDNSKNTLYLQMN |
| | SLRAEDTAVYYCAKDRGLGDGTYFDYWGQGTTVTVSSASTKGPSVFPLAPSSKSTSGGTAALGCLVKDYFPEPVTVSWNSGALT |
| | SGVHTFPAVLQSSGLYSLSSVVTVPSSSLGTQTYICNVNHKPSNTKVDKKVEPKSCDKTHTQVQLVQSGAEVKKPGASVKVSCK |
| | ASGYTFTNYYMQWVRQAPGQGLEWMGIINPSGGVTSYAQKFQGRVTMTRDTSTSTVYMELSSLRSEDTAVYYCARGSAYYYDFA |
| | DYWGQGTLVTVSSASTKGPSVFPLAPSSKSTSGGTAALGCLVKDYFPEPVTVSWNSGALTSGVHTFPAVLQSSGLYSLSSVVTV |
| | PSSSLGTQTYICNVNHKPSNTKVDKKVEPKSCDKTHTCPPCPAPEFEGGPSVFLFPPKPKDTLMISRTPEVTCVVVAVSHEDPE |
| | VKFNWYVDGVEVHNAKTKPREEQYGSTYRVVSVLTVLHQDWLNGKEYKCKVSNKALPAPIEKTISKAKGQPREPQVYTLPPSRE |
| | EMTKNQVSLSCAVKGFYPSDIAVEWESNGQPENNYKTTPPVLDSDGSFFLVSKLTVDKSRWQQGNVFSCSVMHEALHNHYTQKS |
| | LSLSPG |
| 307 | 1scDb-2Fab-AFc-5 Chain3: |
| | QSALTQPASVSGSPGQSITISCSGSSSNIGNNAVNWYQQLPGKAPKLLIYYDDLLPSGVSDRFSGSKSGTSAFLAISGLQSEDE |
| | ADYYCAAWDDSLNGPVFGGGTKLTVLGQPKAAPSVTLFPPSSEELQANKATLVCLISDFYPGAVTVAWKADSSPVKAGVETTTP |
| | SKQSNNKYAASSYLSLTPEQWKSHRSYSCQVTHEGSTVEKTVAPTECSGGGGSSYELTQPLSVSVALGQTARITCGGNNIGSKS |
| | VHWYQQKPGQAPVLVIYQDKKRPSGIPERFSGSNSGNTATLTISRAQAGDEADYYCQVWDDYIVLFGGGTKLTVLGQPKAAPSV |
| | TLFPPSSEELQANKATLVCLISDFYPGAVTVAWKADSSPVKAGVETTTPSKQSNNKYAASSYLSLTPEQWKSHRSYSCQVTHEG |
| | STVEKTVAPTECS |
| 308 | 1scDb-2Fab-AFc-6 Chain1: |
| | EVQLQESGPGLVKPSETLSLTCTVSGGSVSSGSYYWSWIRQPPGKGLEWIGYIYYSGSTNYNPSLKSRVTISVDTSKNQFSLKL |
| | SSVTAADTAVYYCARNPISIPAFDIWGQGTMVTVSSGGSGGSGGSQPVLTQPPSVSVAPGKTARITCGGNNIGSKSVHWYQQKP |
| | GQAPVLVIYYDSDRPSGIPERFSGSNSGNTATLTISRVEAGDEADYYCQVWDTSSDHVLFGGGTKLTVLGGSGGSGGSGGSGGS |
| | GGSGGSQVQLQESGPGLVKPSETLSLTCTVSGGSVSSGSYYWSWIRQPPGKGLEWIGYIYYSGSTNYNPSLKSRVTISVDTSKN |
| | QFSLKLSSVTAADTAVYYCARNPISIPAFDIWGQGTMVTVSSGGSGGSGGSQPVLTQPPSVSVAPGKTARITCGGNNIGSKSVH |
| | WYQQKPGQAPVLVIYYDSDRPSGIPERFSGSNSGNTATLTISRVEAGDEADYYCQVWDTSSDHVLFGGGTKLTVLDKTHTCPPC |
| | PAPEFEGGPSVFLFPPKPKDTLMISRTPEVTCVVVAVSHEDPEVKFNWYVDGVEVHNAKTKPREEQYGSTYRVVSVLTVLHQDW |
| | LNGKEYKCKVSNKALPAPIEKTISKAKGQPREPQVYTLPPSREEMTKNQVSLWCLVKGFYPSDIAVEWESNGQPENNYKTTPPV |
| | LDSDGSFFLYSKLTVDKSRWQQGNVFSCSVMHEALHNHYTQKSLSLSPG |
| 309 | 1scDb-2Fab-AFc-6 Chain2: |
| | EVQLQQWGAGLLKPSETLSLTCAVYGGSFSGYYWSWIRQPPGKGLEWIGEIDHSGSTNYNPSLKSRVTISVDTSKNQFSLKLSS |
| | VTAADTAVYYCARARGPWSFDPWGQGTLVTVSSASTKGPSVFPLAPSSKSTSGGTAALGCLVKDYFPEPVTVSWNSGALTSGVH |
| | TFPAVLQSSGLYSLSSVVTVPSSSLGTQTYICNVNHKPSNTKVDKKVEPKSCDKTHTQVQLVQSGAEVKKPGASVKVSCKASGY |
| | TFTNYYMQWVRQAPGQGLEWMGIINPSGGVTSYAQKFQGRVTMTRDTSTSTVYMELSSLRSEDTAVYYCARGSAYYYDFADYWG |
| | QGTLVTVSSASTKGPSVFPLAPSSKSTSGGTAALGCLVKDYFPEPVTVSWNSGALTSGVHTFPAVLQSSGLYSLSSVVTVPSSS |
| | LGTQTYICNVNHKPSNTKVDKKVEPKSCDKTHTCPPCPAPEFEGGPSVFLFPPKPKDTLMISRTPEVTCVVVAVSHEDPEVKFN |
| | WYVDGVEVHNAKTKPREEQYGSTYRVVSVLTVLHQDWLNGKEYKCKVSNKALPAPIEKTISKAKGQPREPQVYTLPPSREEMTK |
| | NQVSLSCAVKGFYPSDIAVEWESNGQPENNYKTTPPVLDSDGSFFLVSKLTVDKSRWQQGNVFSCSVMHEALHNHYTQKSLSLS |
| | PG |
| 310 | 1scDb-2Fab-AFc-6 Chain3: |
| | DIQMTQSPSTLSASVGDRVTITCRASQSISSWLAWYQQKPGKAPKLLIYKASSLESGVPSRFSGSGSGTEFTLTISSLQPDDFA |
| | TYYCQQYNSYPTFGGGTKVEIKRTVAAPSVFIFPPSDEQLKSGTASVVCLLNNFYPREAKVQWKVDNALQSGNSQESVTEQDSK |
| | DSTYSLSSTLTLSKADYEKHKVYACEVTHQGLSSPVTKSFNRGECGGGGSSYELTQPLSVSVALGQTARITCGGNNIGSKSVHW |
| | YQQKPGQAPVLVIYQDKKRPSGIPERFSGSNSGNTATLTISRAQAGDEADYYCQVWDDYIVLFGGGTKLTVLGQPKAAPSVTLF |
| | PPSSEELQANKATLVCLISDFYPGAVTVAWKADSSPVKAGVETTTPSKQSNNKYAASSYLSLTPEQWKSHRSYSCQVTHEGSTV |
| | EKTVAPTECS |
| 311 | 1scDb-2Fab-AFc-7 Chain1: |
| | EVQLQESGPGLVKPSETLSLTCTVSGGSVSSGSYYWSWIRQPPGKGLEWIGYIYYSGSTNYNPSLKSRVTISVDTSKNQFSLKL |
| | SSVTAADTAVYYCARNPISIPAFDIWGQGTMVTVSSGGSGGSGGSQPVLTQPPSVSVAPGKTARITCGGNNIGSKSVHWYQQKP |
| | GQAPVLVIYYDSDRPSGIPERFSGSNSGNTATLTISRVEAGDEADYYCQVWDTSSDHVLFGGGTKLTVLGGSGGSGGSGGSGGS |
| | GGSGGSQVQLQESGPGLVKPSETLSLTCTVSGGSVSSGSYYWSWIRQPPGKGLEWIGYIYYSGSTNYNPSLKSRVTISVDTSKN |
| | QFSLKLSSVTAADTAVYYCARNPISIPAFDIWGQGTMVTVSSGGSGGSGGSQPVLTQPPSVSVAPGKTARITCGGNNIGSKSVH |
| | WYQQKPGQAPVLVIYYDSDRPSGIPERFSGSNSGNTATLTISRVEAGDEADYYCQVWDTSSDHVLFGGGTKLTVLDKTHTCPPC |
| | PAPEFEGGPSVFLFPPKPKDTLMISRTPEVTCVVVAVSHEDPEVKFNWYVDGVEVHNAKTKPREEQYGSTYRVVSVLTVLHQDW |
| | LNGKEYKCKVSNKALPAPIEKTISKAKGQPREPQVYTLPPSREEMTKNQVSLWCLVKGFYPSDIAVEWESNGQPENNYKTTPPV |
| | LDSDGSFFLYSKLTVDKSRWQQGNVFSCSVMHEALHNHYTQKSLSLSPG |
| 312 | 1scDb-2Fab-AFc-7 Chain2: |
| | EVQLQQSGPELVKPGASVKMSCKASGYTFTDYVINWGKQRSGQGLEWIGEIYPGSGTNYYNEKFKAKATLTADKSSNIAYMQLS |
| | SLTSEDSAVYFCARRGRYGLYAMDYWGQGTSVTVSSASTKGPSVFPLAPSSKSTSGGTAALGCLVKDYFPEPVTVSWNSGALTS |
| | GVHTFPAVLQSSGLYSLSSVVTVPSSSLGTQTYICNVNHKPSNTKVDKKVEPKSCDKTHTQVQLVQSGAEVKKPGASVKVSCKA |
| | SGYTFTNYYMQWVRQAPGQGLEWMGIINPSGGVTSYAQKFQGRVTMTRDTSTSTVYMELSSLRSEDTAVYYCARGSAYYYDFAD |
| | YWGQGTLVTVSSASTKGPSVFPLAPSSKSTSGGTAALGCLVKDYFPEPVTVSWNSGALTSGVHTFPAVLQSSGLYSLSSVVTVP |
| | SSSLGTQTYICNVNHKPSNTKVDKKVEPKSCDKTHTCPPCPAPEFEGGPSVFLFPPKPKDTLMISRTPEVTCVVVAVSHEDPEV |
| | KFNWYVDGVEVHNAKTKPREEQYGSTYRVVSVLTVLHQDWLNGKEYKCKVSNKALPAPIEKTISKAKGQPREPQVYTLPPSREE |
| | MTKNQVSLSCAVKGFYPSDIAVEWESNGQPENNYKTTPPVLDSDGSFFLVSKLTVDKSRWQQGNVFSCSVMHEALHNHYTQKSL |
| | SLSPG |
| 313 | 1scDb-2Fab-AFc-7 Chain3: |
| | DIQMTQTTSSLSASLGDRVTISCRASQDISNYLNWYQQKPDGTVKLLIYYTSRLHSGVPSRFSGSGSGTDYSLTINNLEQEDIA |
| | TYFCQQGNTRPWTFGGGTKLEIKRTVAAPSVFIFPPSDEQLKSGTASVVCLLNNFYPREAKVQWKVDNALQSGNSQESVTEQDS |
| | KDSTYSLSSTLTLSKADYEKHKVYACEVTHQGLSSPVTKSFNRGECGGGGSSYELTQPLSVSVALGQTARITCGGNNIGSKSVH |
| | WYQQKPGQAPVLVIYQDKKRPSGIPERFSGSNSGNTATLTISRAQAGDEADYYCQVWDDYIVLFGGGTKLTVLGQPKAAPSVTL |
| | FPPSSEELQANKATLVCLISDFYPGAVTVAWKADSSPVKAGVETTTPSKQSNNKYAASSYLSLTPEQWKSHRSYSCQVTHEGST |
| | VEKTVAPTECS |
| 314 | 1scDb-2Fab-AFc-8 Chain1: |
| | EVQLQESGPGLVKPSETLSLTCTVSGGSVSSGSYYWSWIRQPPGKGLEWIGYIYYSGSTNYNPSLKSRVTISVDTSKNQFSLKL |
| | SSVTAADTAVYYCARNPISIPAFDIWGQGTMVTVSSGGSGGSGGSQPVLTQPPSVSVAPGKTARITCGGNNIGSKSVHWYQQKP |
| | GQAPVLVIYYDSDRPSGIPERFSGSNSGNTATLTISRVEAGDEADYYCQVWDTSSDHVLFGGGTKLTVLGGSGGSGGSGGSGGS |
| | GGSGGSQVQLQESGPGLVKPSETLSLTCTVSGGSVSSGSYYWSWIRQPPGKGLEWIGYIYYSGSTNYNPSLKSRVTISVDTSKN |
| | QFSLKLSSVTAADTAVYYCARNPISIPAFDIWGQGTMVTVSSGGSGGSGGSQPVLTQPPSVSVAPGKTARITCGGNNIGSKSVH |
| | WYQQKPGQAPVLVIYYDSDRPSGIPERFSGSNSGNTATLTISRVEAGDEADYYCQVWDTSSDHVLFGGGTKLTVLDKTHTCPPC |
| | PAPEFEGGPSVFLFPPKPKDTLMISRTPEVTCVVVAVSHEDPEVKFNWYVDGVEVHNAKTKPREEQYGSTYRVVSVLTVLHQDW |
| | LNGKEYKCKVSNKALPAPIEKTISKAKGQPREPQVYTLPPSREEMTKNQVSLWCLVKGFYPSDIAVEWESNGQPENNYKTTPPV |
| | LDSDGSFFLYSKLTVDKSRWQQGNVFSCSVMHEALHNHYTQKSLSLSPG |
| 315 | 1scDb-2Fab-AFc-8 Chain2: |
| | EVQLQQSGPELVKPGASVKISCKTSGYTFTEYTMHWVKQSHGKSLEWIGGISPNIGGTSYNQKFKGKATLTVDKSSSTAYMELR |
| | SLTSEDSAVYYCARRGGSFDYWGQGTTLTVSSASTKGPSVFPLAPSSKSTSGGTAALGCLVKDYFPEPVTVSWNSGALTSGVHT |
| | FPAVLQSSGLYSLSSVVTVPSSSLGTQTYICNVNHKPSNTKVDKKVEPKSCDKTHTQVQLVQSGAEVKKPGASVKVSCKASGYT |
| | FTNYYMQWVRQAPGQGLEWMGIINPSGGVTSYAQKFQGRVTMTRDTSTSTVYMELSSLRSEDTAVYYCARGSAYYYDFADYWGQ |
| | GTLVTVSSASTKGPSVFPLAPSSKSTSGGTAALGCLVKDYFPEPVTVSWNSGALTSGVHTFPAVLQSSGLYSLSSVVTVPSSSL |
| | GTQTYICNVNHKPSNTKVDKKVEPKSCDKTHTCPPCPAPEFEGGPSVFLFPPKPKDTLMISRTPEVTCVVVAVSHEDPEVKFNW |
| | YVDGVEVHNAKTKPREEQYGSTYRVVSVLTVLHQDWLNGKEYKCKVSNKALPAPIEKTISKAKGQPREPQVYTLPPSREEMTKN |
| | QVSLSCAVKGFYPSDIAVEWESNGQPENNYKTTPPVLDSDGSFFLVSKLTVDKSRWQQGNVFSCSVMHEALHNHYTQKSLSLSP |
| | G |
| 316 | 1scDb-2Fab-AFc-8 Chain3: |
| | DIVMTQSPATLSVTPGDRVSLSCRASQSISDYLHWYQQKSHESPRLLIKYASQSISGIPSRFSGSGSGSDFTLSINSVEPEDVG |
| | VYYCQNGHSFPLTFGAGTKLELKRTVAAPSVFIFPPSDEQLKSGTASVVCLLNNFYPREAKVQWKVDNALQSGNSQESVTEQDS |
| | KDSTYSLSSTLTLSKADYEKHKVYACEVTHQGLSSPVTKSFNRGECGGGGSSYELTQPLSVSVALGQTARITCGGNNIGSKSVH |
| | WYQQKPGQAPVLVIYQDKKRPSGIPERFSGSNSGNTATLTISRAQAGDEADYYCQVWDDYIVLFGGGTKLTVLGQPKAAPSVTL |
| | FPPSSEELQANKATLVCLISDFYPGAVTVAWKADSSPVKAGVETTTPSKQSNNKYAASSYLSLTPEQWKSHRSYSCQVTHEGST |
| | VEKTVAPTECS |
| 317 | 1scDb-1Fab-AFc-1 Chain1: |
| | EVQLVESGGGLVKPGGSLKLSCAASGYTFTSYVMHWVRQAPGKGLEWIGYINPYNDGTKYNEKFQGRVTISSDKSISTAYMELS |
| | SLRSEDTAMYYCARGTYYYGTRVFDYWGQGTLVTVSSGGSGGSGGSDIVMTQSPATLSLSPGERATLSCRSSKSLQNVNGNTYL |
| | YWFQQKPGQSPQLLIYRMSNLNSGVPDRFSGSGSGTEFTLTISSLEPEDFAVYYCMQHLEYPITFGAGTKLEIKGGSGGSGGSG |
| | GSGGSGGSGGSEVQLVESGGGLVKPGGSLKLSCAASGYTFTSYVMHWVRQAPGKGLEWIGYINPYNDGTKYNEKFQGRVTISSD |
| | KSISTAYMELSSLRSEDTAMYYCARGTYYYGTRVFDYWGQGTLVTVSSGGSGGSGGSDIVMTQSPATLSLSPGERATLSCRSSK |
| | SLQNVNGNTYLYWFQQKPGQSPQLLIYRMSNLNSGVPDRFSGSGSGTEFTLTISSLEPEDFAVYYCMQHLEYPITFGAGTKLEI |
| | KDKTHTCPPCPAPELLGGPSVFLFPPKPKDTLMISRTPEVTCVVVDVSHEDPEVKFNWYVDGVEVHNAKTKPREEQYNSTYRVV |
| | SVLTVLHQDWLNGKEYKCKVSNKALPAPIEKTISKAKGQPREPQVYTLPPSREEMTKNQVSLWCLVKGFYPSDIAVEWESNGQP |
| | ENNYKTTPPVLDSDGSFFLYSKLTVDKSRWQQGNVFSCSVMHEALHNHYTQKSLSLSPG |
| 318 | 1scDb-1Fab-AFc-1 Chain2: |
| | EVQLVESGGGLVKPGGSLRLSCAASGFTFSSYGMHWVRQAPGKGLEWVAFIRYDGSNKYYADSVKGRFTISRDNSKNTLYLQMN |
| | SLRAEDTAVYYCAKDRGLGDGTYFDYWGQGTTVTVSSASTKGPSVFPLAPSSKSTSGGTAALGCLVKDYFPEPVTVSWNSGALT |
| | SGVHTFPAVLQSSGLYSLSSVVTVPSSSLGTQTYICNVNHKPSNTKVDKKVEPKSCDKTHTCPPCPAPELLGGPSVFLFPPKPK |
| | DTLMISRTPEVTCVVVDVSHEDPEVKFNWYVDGVEVHNAKTKPREEQYNSTYRVVSVLTVLHQDWLNGKEYKCKVSNKALPAPI |
| | EKTISKAKGQPREPQVYTLPPSREEMTKNQVSLSCAVKGFYPSDIAVEWESNGQPENNYKTTPPVLDSDGSFFLVSKLTVDKSR |
| | WQQGNVFSCSVMHEALHNHYTQKSLSLSPG |
| 319 | 1scDb-1Fab-AFc-1 Chain3: |
| | QSALTQPASVSGSPGQSITISCSGSSSNIGNNAVNWYQQLPGKAPKLLIYYDDLLPSGVSDRFSGSKSGTSAFLAISGLQSEDE |
| | ADYYCAAWDDSLNGPVFGGGTKLTVLGQPKAAPSVTLFPPSSEELQANKATLVCLISDFYPGAVTVAWKADSSPVKAGVETTTP |
| | SKQSNNKYAASSYLSLTPEQWKSHRSYSCQVTHEGSTVEKTVAPTECS |
| 320 | 1scDb-1Fab-AFc-2 Chain1: |
| | EVQLVESGGGLVKPGGSLKLSCAASGYTFTSYVMHWVRQAPGKGLEWIGYINPYNDGTKYNEKFQGRVTISSDKSISTAYMELS |
| | SLRSEDTAMYYCARGTYYYGTRVFDYWGQGTLVTVSSGGSGGSGGSDIVMTQSPATLSLSPGERATLSCRSSKSLQNVNGNTYL |
| | YWFQQKPGQSPQLLIYRMSNLNSGVPDRFSGSGSGTEFTLTISSLEPEDFAVYYCMQHLEYPITFGAGTKLEIKGGSGGSGGSG |
| | GSGGSGGSGGSEVQLVESGGGLVKPGGSLKLSCAASGYTFTSYVMHWVRQAPGKGLEWIGYINPYNDGTKYNEKFQGRVTISSD |
| | KSISTAYMELSSLRSEDTAMYYCARGTYYYGTRVFDYWGQGTLVTVSSGGSGGSGGSDIVMTQSPATLSLSPGERATLSCRSSK |
| | SLQNVNGNTYLYWFQQKPGQSPQLLIYRMSNLNSGVPDRFSGSGSGTEFTLTISSLEPEDFAVYYCMQHLEYPITFGAGTKLEI |
| | KDKTHTCPPCPAPELLGGPSVFLFPPKPKDTLMISRTPEVTCVVVDVSHEDPEVKFNWYVDGVEVHNAKTKPREEQYNSTYRVV |
| | SVLTVLHQDWLNGKEYKCKVSNKALPAPIEKTISKAKGQPREPQVYTLPPSREEMTKNQVSLWCLVKGFYPSDIAVEWESNGQP |
| | ENNYKTTPPVLDSDGSFFLYSKLTVDKSRWQQGNVFSCSVMHEALHNHYTQKSLSLSPG |
| 321 | 1scDb-1Fab-AFc-2 Chain2: |
| | EVQLQQWGAGLLKPSETLSLTCAVYGGSFSGYYWSWIRQPPGKGLEWIGEIDHSGSTNYNPSLKSRVTISVDTSKNQFSLKLSS |
| | VTAADTAVYYCARARGPWSFDPWGQGTLVTVSSASTKGPSVFPLAPSSKSTSGGTAALGCLVKDYFPEPVTVSWNSGALTSGVH |
| | TFPAVLQSSGLYSLSSVVTVPSSSLGTQTYICNVNHKPSNTKVDKKVEPKSCDKTHTCPPCPAPELLGGPSVFLFPPKPKDTLM |
| | ISRTPEVTCVVVDVSHEDPEVKFNWYVDGVEVHNAKTKPREEQYNSTYRVVSVLTVLHQDWLNGKEYKCKVSNKALPAPIEKTI |
| | SKAKGQPREPQVYTLPPSREEMTKNQVSLSCAVKGFYPSDIAVEWESNGQPENNYKTTPPVLDSDGSFFLVSKLTVDKSRWQQG |
| | NVFSCSVMHEALHNHYTQKSLSLSPG |
| 322 | 1scDb-1Fab-AFc-2 Chain3: |
| | DIQMTQSPSTLSASVGDRVTITCRASQSISSWLAWYQQKPGKAPKLLIYKASSLESGVPSRFSGSGSGTEFTLTISSLQPDDFA |
| | TYYCQQYNSYPTFGGGTKVEIKRTVAAPSVFIFPPSDEQLKSGTASVVCLLNNFYPREAKVQWKVDNALQSGNSQESVTEQDSK |
| | DSTYSLSSTLTLSKADYEKHKVYACEVTHQGLSSPVTKSFNRGEC |
| 323 | 1scDb-1Fab-AFc-3 Chain1: |
| | EVQLVESGGGLVKPGGSLKLSCAASGYTFTSYVMHWVRQAPGKGLEWIGYINPYNDGTKYNEKFQGRVTISSDKSISTAYMELS |
| | SLRSEDTAMYYCARGTYYYGTRVFDYWGQGTLVTVSSGGSGGSGGSDIVMTQSPATLSLSPGERATLSCRSSKSLQNVNGNTYL |
| | YWFQQKPGQSPQLLIYRMSNLNSGVPDRFSGSGSGTEFTLTISSLEPEDFAVYYCMQHLEYPITFGAGTKLEIKGGSGGSGGSG |
| | GSGGSGGSGGSEVQLVESGGGLVKPGGSLKLSCAASGYTFTSYVMHWVRQAPGKGLEWIGYINPYNDGTKYNEKFQGRVTISSD |
| | KSISTAYMELSSLRSEDTAMYYCARGTYYYGTRVFDYWGQGTLVTVSSGGSGGSGGSDIVMTQSPATLSLSPGERATLSCRSSK |
| | SLQNVNGNTYLYWFQQKPGQSPQLLIYRMSNLNSGVPDRFSGSGSGTEFTLTISSLEPEDFAVYYCMQHLEYPITFGAGTKLEI |
| | KDKTHTCPPCPAPELLGGPSVFLFPPKPKDTLMISRTPEVTCVVVDVSHEDPEVKFNWYVDGVEVHNAKTKPREEQYNSTYRVV |
| | SVLTVLHQDWLNGKEYKCKVSNKALPAPIEKTISKAKGQPREPQVYTLPPSREEMTKNQVSLWCLVKGFYPSDIAVEWESNGQP |
| | ENNYKTTPPVLDSDGSFFLYSKLTVDKSRWQQGNVFSCSVMHEALHNHYTQKSLSLSPG |
| 324 | 1scDb-1Fab-AFc-3 Chain2: |
| | EVQLQQSGPELVKPGASVKMSCKASGYTFTDYVINWGKQRSGQGLEWIGEIYPGSGTNYYNEKFKAKATLTADKSSNIAYMQLS |
| | SLTSEDSAVYFCARRGRYGLYAMDYWGQGTSVTVSSASTKGPSVFPLAPSSKSTSGGTAALGCLVKDYFPEPVTVSWNSGALTS |
| | GVHTFPAVLQSSGLYSLSSVVTVPSSSLGTQTYICNVNHKPSNTKVDKKVEPKSCDKTHTCPPCPAPELLGGPSVFLFPPKPKD |
| | TLMISRTPEVTCVVVDVSHEDPEVKFNWYVDGVEVHNAKTKPREEQYNSTYRVVSVLTVLHQDWLNGKEYKCKVSNKALPAPIE |
| | KTISKAKGQPREPQVYTLPPSREEMTKNQVSLSCAVKGFYPSDIAVEWESNGQPENNYKTTPPVLDSDGSFFLVSKLTVDKSRW |
| | QQGNVFSCSVMHEALHNHYTQKSLSLSPG |
| 325 | 1scDb-1Fab-AFc-3 Chain3: |
| | DIQMTQTTSSLSASLGDRVTISCRASQDISNYLNWYQQKPDGTVKLLIYYTSRLHSGVPSRFSGSGSGTDYSLTINNLEQEDIA |
| | TYFCQQGNTRPWTFGGGTKLEIKRTVAAPSVFIFPPSDEQLKSGTASVVCLLNNFYPREAKVQWKVDNALQSGNSQESVTEQDS |
| | KDSTYSLSSTLTLSKADYEKHKVYACEVTHQGLSSPVTKSFNRGEC |
| 326 | 1scDb-1Fab-AFc-4 Chain1: |
| | EVQLVESGGGLVKPGGSLKLSCAASGYTFTSYVMHWVRQAPGKGLEWIGYINPYNDGTKYNEKFQGRVTISSDKSISTAYMELS |
| | SLRSEDTAMYYCARGTYYYGTRVFDYWGQGTLVTVSSGGSGGSGGSDIVMTQSPATLSLSPGERATLSCRSSKSLQNVNGNTYL |
| | YWFQQKPGQSPQLLIYRMSNLNSGVPDRFSGSGSGTEFTLTISSLEPEDFAVYYCMQHLEYPITFGAGTKLEIKGGSGGSGGSG |
| | GSGGSGGSGGSEVQLVESGGGLVKPGGSLKLSCAASGYTFTSYVMHWVRQAPGKGLEWIGYINPYNDGTKYNEKFQGRVTISSD |
| | KSISTAYMELSSLRSEDTAMYYCARGTYYYGTRVFDYWGQGTLVTVSSGGSGGSGGSDIVMTQSPATLSLSPGERATLSCRSSK |
| | SLQNVNGNTYLYWFQQKPGQSPQLLIYRMSNLNSGVPDRFSGSGSGTEFTLTISSLEPEDFAVYYCMQHLEYPITFGAGTKLEI |
| | KDKTHTCPPCPAPELLGGPSVFLFPPKPKDTLMISRTPEVTCVVVDVSHEDPEVKFNWYVDGVEVHNAKTKPREEQYNSTYRVV |
| | SVLTVLHQDWLNGKEYKCKVSNKALPAPIEKTISKAKGQPREPQVYTLPPSREEMTKNQVSLWCLVKGFYPSDIAVEWESNGQP |
| | ENNYKTTPPVLDSDGSFFLYSKLTVDKSRWQQGNVFSCSVMHEALHNHYTQKSLSLSPG |
| 327 | 1scDb-1Fab-AFc-4 Chain2: |
| | EVQLQQSGPELVKPGASVKISCKTSGYTFTEYTMHWVKQSHGKSLEWIGGISPNIGGTSYNQKFKGKATLTVDKSSSTAYMELR |
| | SLTSEDSAVYYCARRGGSFDYWGQGTTLTVSSASTKGPSVFPLAPSSKSTSGGTAALGCLVKDYFPEPVTVSWNSGALTSGVHT |
| | FPAVLQSSGLYSLSSVVTVPSSSLGTQTYICNVNHKPSNTKVDKKVEPKSCDKTHTCPPCPAPELLGGPSVFLFPPKPKDTLMI |
| | SRTPEVTCVVVDVSHEDPEVKFNWYVDGVEVHNAKTKPREEQYNSTYRVVSVLTVLHQDWLNGKEYKCKVSNKALPAPIEKTIS |
| | KAKGQPREPQVYTLPPSREEMTKNQVSLSCAVKGFYPSDIAVEWESNGQPENNYKTTPPVLDSDGSFFLVSKLTVDKSRWQQGN |
| | VFSCSVMHEALHNHYTQKSLSLSPG |
| 328 | 1scDb-1Fab-AFc-4 Chain3: |
| | DIVMTQSPATLSVTPGDRVSLSCRASQSISDYLHWYQQKSHESPRLLIKYASQSISGIPSRFSGSGSGSDFTLSINSVEPEDVG |
| | VYYCQNGHSFPLTFGAGTKLELKRTVAAPSVFIFPPSDEQLKSGTASVVCLLNNFYPREAKVQWKVDNALQSGNSQESVTEQDS |
| | KDSTYSLSSTLTLSKADYEKHKVYACEVTHQGLSSPVTKSFNRGEC |
| 329 | AIG-2scFv-16 Chain1: |
| | EVQLVESGGGLVKPGGSLKLSCAASGYTFTSYVMHWVRQAPGKGLEWIGYINPYNDGTKYNEKFQGRVTISSDKSISTAYMELS |
| | SLRSEDTAMYYCARGTYYYGTRVFDYWGQGTLVTVSSASTKGPSVFPLAPSSKSTSGGTAALGCLVKDYFPEPVTVSWNSGALT |
| | SGVHTFPAVLQSSGLYSLSSVVTVPSSSLGTQTYICNVNHKPSNTKVDKKVEPKSCDKTHTCPPCPAPEFEGGPSVFLFPPKPK |
| | DTLMISRTPEVTCVVVAVSHEDPEVKFNWYVDGVEVHNAKTKPREEQYGSTYRVVSVLTVLHQDWLNGKEYKCKVSNKALPAPI |
| | EKTISKAKGQPREPQVYTLPPSREEMTKNQVSLWCLVKGFYPSDIAVEWESNGQPENNYKTTPPVLDSDGSFFLYSKLTVDKSR |
| | WQQGNVFSCSVMHEALHNHYTQKSLSLSPGGGGGSGGGGSGGGGSGGGGSGGGGSGGGGSQVQLVESGGGLVKPGGSLRLSCAA |
| | SGFTFSSYGMHWVRQAPGKGLEWVAFIRYDGSNKYYADSVKGRFTISRDNSKNTLYLQMNSLRAEDTAVYYCAKDRGLGDGTYF |
| | DYWGQGTTVTVSSGGSGGSGGSGGSGGSGGSQSALTQPASVSGSPGQSITISCSGSSSNIGNNAVNWYQQLPGKAPKLLIYYDD |
| | LLPSGVSDRFSGSKSGTSAFLAISGLQSEDEADYYCAAWDDSLNGPVFGGGTKLTVL |
| 330 | AIG-2scFv-16 Chain2: |
| | DIVMTQSPATLSLSPGERATLSCRSSKSLQNVNGNTYLYWFQQKPGQSPQLLIYRMSNLNSGVPDRFSGSGSGTEFTLTISSLE |
| | PEDFAVYYCMQHLEYPITFGAGTKLEIKRTVAAPSVFIFPPSDEQLKSGTASVVCLLNNFYPREAKVQWKVDNALQSGNSQESV |
| | TEQDSKDSTYSLSSTLTLSKADYEKHKVYACEVTHQGLSSPVTKSFNRGEC |
| 331 | AIG-2scFv-16 Chain3: |
| | EVQLVESGGGLVKPGGSLKLSCAASGYTFTSYVMHWVRQAPGKGLEWIGYINPYNDGTKYNEKFQGRVTISSDKSISTAYMELS |
| | SLRSEDTAMYYCARGTYYYGTRVFDYWGQGTLVTVSSASTKGPSVFPLAPSSKSTSGGTAALGCLVKDYFPEPVTVSWNSGALT |
| | SGVHTFPAVLQSSGLYSLSSVVTVPSSSLGTQTYICNVNHKPSNTKVDKKVEPKSCDKTHTCPPCPAPEFEGGPSVFLFPPKPK |
| | DTLMISRTPEVTCVVVAVSHEDPEVKFNWYVDGVEVHNAKTKPREEQYGSTYRVVSVLTVLHQDWLNGKEYKCKVSNKALPAPI |
| | EKTISKAKGQPREPQVYTLPPSREEMTKNQVSLSCAVKGFYPSDIAVEWESNGQPENNYKTTPPVLDSDGSFFLVSKLTVDKSR |
| | WQQGNVFSCSVMHEALHNHYTQKSLSLSPGGGGGSGGGGSGGGGSGGGGSGGGGSGGGGSSYELTQPLSVSVALGQTARITCGG |
| | NNIGSKSVHWYQQKPGQAPVLVIYQDKKRPSGIPERFSGSNSGNTATLTISRAQAGDEADYYCQVWDDYIVLFGCGTKLTVLGG |
| | SGGSGGSGGSGGSGGSGGSQVQLVQSGAEVKKPGASVKVSCKASGYTFTNYYMQWVRQAPGQCLEWMGIINPSGGVTSYAQKFQ |
| | GRVTMTRDTSTSTVYMELSSLRSEDTAVYYCARGSAYYYDFADYWGQGTLVTVSS |
| 332 | AIG-2scFv-17 Chain1: |
| | EVQLVESGGGLVKPGGSLKLSCAASGYTFTSYVMHWVRQAPGKGLEWIGYINPYNDGTKYNEKFQGRVTISSDKSISTAYMELS |
| | SLRSEDTAMYYCARGTYYYGTRVFDYWGQGTLVTVSSASTKGPSVFPLAPSSKSTSGGTAALGCLVKDYFPEPVTVSWNSGALT |
| | SGVHTFPAVLQSSGLYSLSSVVTVPSSSLGTQTYICNVNHKPSNTKVDKKVEPKSCDKTHTCPPCPAPEFEGGPSVFLFPPKPK |
| | DTLMISRTPEVTCVVVAVSHEDPEVKFNWYVDGVEVHNAKTKPREEQYGSTYRVVSVLTVLHQDWLNGKEYKCKVSNKALPAPI |
| | EKTISKAKGQPREPQVYTLPPSREEMTKNQVSLWCLVKGFYPSDIAVEWESNGQPENNYKTTPPVLDSDGSFFLYSKLTVDKSR |
| | WQQGNVFSCSVMHEALHNHYTQKSLSLSPGGGGGSGGGGSGGGGSGGGGSGGGGSGGGGSQVQLQQWGAGLLKPSETLSLTCAV |
| | YGGSFSGYYWSWIRQPPGKGLEWIGEIDHSGSTNYNPSLKSRVTISVDTSKNQFSLKLSSVTAADTAVYYCARARGPWSFDPWG |
| | QGTLVTVSSGGSGGSGGSGGSGGSGGSDIQMTQSPSTLSASVGDRVTITCRASQSISSWLAWYQQKPGKAPKLLIYKASSLESG |
| | VPSRFSGSGSGTEFTLTISSLQPDDFATYYCQQYNSYPTFGGGTKVEIK |
| 333 | AIG-2scFv-17 Chain2: |
| | DIVMTQSPATLSLSPGERATLSCRSSKSLQNVNGNTYLYWFQQKPGQSPQLLIYRMSNLNSGVPDRFSGSGSGTEFTLTISSLE |
| | PEDFAVYYCMQHLEYPITFGAGTKLEIKRTVAAPSVFIFPPSDEQLKSGTASVVCLLNNFYPREAKVQWKVDNALQSGNSQESV |
| | TEQDSKDSTYSLSSTLTLSKADYEKHKVYACEVTHQGLSSPVTKSFNRGEC |
| 334 | AIG-2scFv-17 Chain3: |
| | EVQLVESGGGLVKPGGSLKLSCAASGYTFTSYVMHWVRQAPGKGLEWIGYINPYNDGTKYNEKFQGRVTISSDKSISTAYMELS |
| | SLRSEDTAMYYCARGTYYYGTRVFDYWGQGTLVTVSSASTKGPSVFPLAPSSKSTSGGTAALGCLVKDYFPEPVTVSWNSGALT |
| | SGVHTFPAVLQSSGLYSLSSVVTVPSSSLGTQTYICNVNHKPSNTKVDKKVEPKSCDKTHTCPPCPAPEFEGGPSVFLFPPKPK |
| | DTLMISRTPEVTCVVVAVSHEDPEVKFNWYVDGVEVHNAKTKPREEQYGSTYRVVSVLTVLHQDWLNGKEYKCKVSNKALPAPI |
| | EKTISKAKGQPREPQVYTLPPSREEMTKNQVSLSCAVKGFYPSDIAVEWESNGQPENNYKTTPPVLDSDGSFFLVSKLTVDKSR |
| | WQQGNVFSCSVMHEALHNHYTQKSLSLSPGGGGGSGGGGSGGGGSGGGGSGGGGSGGGGSSYELTQPLSVSVALGQTARITCGG |
| | NNIGSKSVHWYQQKPGQAPVLVIYQDKKRPSGIPERFSGSNSGNTATLTISRAQAGDEADYYCQVWDDYIVLFGCGTKLTVLGG |
| | SGGSGGSGGSGGSGGSGGSQVQLVQSGAEVKKPGASVKVSCKASGYTFTNYYMQWVRQAPGQCLEWMGIINPSGGVTSYAQKFQ |
| | GRVTMTRDTSTSTVYMELSSLRSEDTAVYYCARGSAYYYDFADYWGQGTLVTVSS |
| 335 | AIG-2scFv-18 Chain1: |
| | EVQLVESGGGLVKPGGSLKLSCAASGYTFTSYVMHWVRQAPGKGLEWIGYINPYNDGTKYNEKFQGRVTISSDKSISTAYMELS |
| | SLRSEDTAMYYCARGTYYYGTRVFDYWGQGTLVTVSSASTKGPSVFPLAPSSKSTSGGTAALGCLVKDYFPEPVTVSWNSGALT |
| | SGVHTFPAVLQSSGLYSLSSVVTVPSSSLGTQTYICNVNHKPSNTKVDKKVEPKSCDKTHTCPPCPAPEFEGGPSVFLFPPKPK |
| | DTLMISRTPEVTCVVVAVSHEDPEVKFNWYVDGVEVHNAKTKPREEQYGSTYRVVSVLTVLHQDWLNGKEYKCKVSNKALPAPI |
| | EKTISKAKGQPREPQVYTLPPSREEMTKNQVSLWCLVKGFYPSDIAVEWESNGQPENNYKTTPPVLDSDGSFFLYSKLTVDKSR |
| | WQQGNVFSCSVMHEALHNHYTQKSLSLSPGGGGGSGGGGSGGGGSGGGGSGGGGSGGGGSQVQLQQSGPELVKPGASVKMSCKA |
| | SGYTFTDYVINWGKQRSGQGLEWIGEIYPGSGTNYYNEKFKAKATLTADKSSNIAYMQLSSLTSEDSAVYFCARRGRYGLYAMD |
| | YWGQGTSVTVSSGGSGGSGGSGGSGGSGGSDIQMTQTTSSLSASLGDRVTISCRASQDISNYLNWYQQKPDGTVKLLIYYTSRL |
| | HSGVPSRFSGSGSGTDYSLTINNLEQEDIATYFCQQGNTRPWTFGGGTKLEIK |
| 336 | AIG-2scFv-18 Chain2: |
| | DIVMTQSPATLSLSPGERATLSCRSSKSLQNVNGNTYLYWFQQKPGQSPQLLIYRMSNLNSGVPDRFSGSGSGTEFTLTISSLE |
| | PEDFAVYYCMQHLEYPITFGAGTKLEIKRTVAAPSVFIFPPSDEQLKSGTASVVCLLNNFYPREAKVQWKVDNALQSGNSQESV |
| | TEQDSKDSTYSLSSTLTLSKADYEKHKVYACEVTHQGLSSPVTKSFNRGEC |
| 337 | AIG-2scFv-18 Chain3: |
| | EVQLVESGGGLVKPGGSLKLSCAASGYTFTSYVMHWVRQAPGKGLEWIGYINPYNDGTKYNEKFQGRVTISSDKSISTAYMELS |
| | SLRSEDTAMYYCARGTYYYGTRVFDYWGQGTLVTVSSASTKGPSVFPLAPSSKSTSGGTAALGCLVKDYFPEPVTVSWNSGALT |
| | SGVHTFPAVLQSSGLYSLSSVVTVPSSSLGTQTYICNVNHKPSNTKVDKKVEPKSCDKTHTCPPCPAPEFEGGPSVFLFPPKPK |
| | DTLMISRTPEVTCVVVAVSHEDPEVKFNWYVDGVEVHNAKTKPREEQYGSTYRVVSVLTVLHQDWLNGKEYKCKVSNKALPAPI |
| | EKTISKAKGQPREPQVYTLPPSREEMTKNQVSLSCAVKGFYPSDIAVEWESNGQPENNYKTTPPVLDSDGSFFLVSKLTVDKSR |
| | WQQGNVFSCSVMHEALHNHYTQKSLSLSPGGGGGSGGGGSGGGGSGGGGSGGGGSGGGGSSYELTQPLSVSVALGQTARITCGG |
| | NNIGSKSVHWYQQKPGQAPVLVIYQDKKRPSGIPERFSGSNSGNTATLTISRAQAGDEADYYCQVWDDYIVLFGCGTKLTVLGG |
| | SGGSGGSGGSGGSGGSGGSQVQLVQSGAEVKKPGASVKVSCKASGYTFTNYYMQWVRQAPGQCLEWMGIINPSGGVTSYAQKFQ |
| | GRVTMTRDTSTSTVYMELSSLRSEDTAVYYCARGSAYYYDFADYWGQGTLVTVSS |
| 338 | AIG-2scFv-19 Chain1: |
| | EVQLVESGGGLVKPGGSLKLSCAASGYTFTSYVMHWVRQAPGKGLEWIGYINPYNDGTKYNEKFQGRVTISSDKSISTAYMELS |
| | SLRSEDTAMYYCARGTYYYGTRVFDYWGQGTLVTVSSASTKGPSVFPLAPSSKSTSGGTAALGCLVKDYFPEPVTVSWNSGALT |
| | SGVHTFPAVLQSSGLYSLSSVVTVPSSSLGTQTYICNVNHKPSNTKVDKKVEPKSCDKTHTCPPCPAPEFEGGPSVFLFPPKPK |
| | DTLMISRTPEVTCVVVAVSHEDPEVKFNWYVDGVEVHNAKTKPREEQYGSTYRVVSVLTVLHQDWLNGKEYKCKVSNKALPAPI |
| | EKTISKAKGQPREPQVYTLPPSREEMTKNQVSLWCLVKGFYPSDIAVEWESNGQPENNYKTTPPVLDSDGSFFLYSKLTVDKSR |
| | WQQGNVFSCSVMHEALHNHYTQKSLSLSPGGGGGSGGGGSGGGGSGGGGSGGGGSGGGGSEVQLQQSGPELVKPGASVKISCKT |
| | SGYTFTEYTMHWVKQSHGKSLEWIGGISPNIGGTSYNQKFKGKATLTVDKSSSTAYMELRSLTSEDSAVYYCARRGGSFDYWGQ |
| | GTTLTVSSGGSGGSGGSGGSGGSGGSDIVMTQSPATLSVTPGDRVSLSCRASQSISDYLHWYQQKSHESPRLLIKYASQSISGI |
| | PSRFSGSGSGSDFTLSINSVEPEDVGVYYCQNGHSFPLTFGAGTKLELK |
| 339 | AIG-2scFv-19 Chain2: |
| | DIVMTQSPATLSLSPGERATLSCRSSKSLQNVNGNTYLYWFQQKPGQSPQLLIYRMSNLNSGVPDRFSGSGSGTEFTLTISSLE |
| | PEDFAVYYCMQHLEYPITFGAGTKLEIKRTVAAPSVFIFPPSDEQLKSGTASVVCLLNNFYPREAKVQWKVDNALQSGNSQESV |
| | TEQDSKDSTYSLSSTLTLSKADYEKHKVYACEVTHQGLSSPVTKSFNRGEC |
| 340 | AIG-2scFv-19 Chain3: |
| | EVQLVESGGGLVKPGGSLKLSCAASGYTFTSYVMHWVRQAPGKGLEWIGYINPYNDGTKYNEKFQGRVTISSDKSISTAYMELS |
| | SLRSEDTAMYYCARGTYYYGTRVFDYWGQGTLVTVSSASTKGPSVFPLAPSSKSTSGGTAALGCLVKDYFPEPVTVSWNSGALT |
| | SGVHTFPAVLQSSGLYSLSSVVTVPSSSLGTQTYICNVNHKPSNTKVDKKVEPKSCDKTHTCPPCPAPEFEGGPSVFLFPPKPK |
| | DTLMISRTPEVTCVVVAVSHEDPEVKFNWYVDGVEVHNAKTKPREEQYGSTYRVVSVLTVLHQDWLNGKEYKCKVSNKALPAPI |
| | EKTISKAKGQPREPQVYTLPPSREEMTKNQVSLSCAVKGFYPSDIAVEWESNGQPENNYKTTPPVLDSDGSFFLVSKLTVDKSR |
| | WQQGNVFSCSVMHEALHNHYTQKSLSLSPGGGGGSGGGGSGGGGSGGGGSGGGGSGGGGSSYELTQPLSVSVALGQTARITCGG |
| | NNIGSKSVHWYQQKPGQAPVLVIYQDKKRPSGIPERFSGSNSGNTATLTISRAQAGDEADYYCQVWDDYIVLFGCGTKLTVLGG |
| | SGGSGGSGGSGGSGGSGGSQVQLVQSGAEVKKPGASVKVSCKASGYTFTNYYMQWVRQAPGQCLEWMGIINPSGGVTSYAQKFQ |
| | GRVTMTRDTSTSTVYMELSSLRSEDTAVYYCARGSAYYYDFADYWGQGTLVTVSS |
| 341 | AIG-2scFv-20 Chain1: |
| | EVQLVESGGGLVKPGGSLKLSCAASGYTFTSYVMHWVRQAPGKGLEWIGYINPYNDGTKYNEKFQGRVTISSDKSISTAYMELS |
| | SLRSEDTAMYYCARGTYYYGTRVFDYWGQGTLVTVSSASTKGPSVFPLAPSSKSTSGGTAALGCLVKDYFPEPVTVSWNSGALT |
| | SGVHTFPAVLQSSGLYSLSSVVTVPSSSLGTQTYICNVNHKPSNTKVDKKVEPKSCDKTHTCPPCPAPEFEGGPSVFLFPPKPK |
| | DTLMISRTPEVTCVVVAVSHEDPEVKFNWYVDGVEVHNAKTKPREEQYGSTYRVVSVLTVLHQDWLNGKEYKCKVSNKALPAPI |
| | EKTISKAKGQPREPQVYTLPPSREEMTKNQVSLWCLVKGFYPSDIAVEWESNGQPENNYKTTPPVLDSDGSFFLYSKLTVDKSR |
| | WQQGNVFSCSVMHEALHNHYTQKSLSLSPGGGGGSGGGGSGGGGSGGGGSGGGGSGGGGSQVQLVESGGGLVKPGGSLRLSCAA |
| | SGFTFSSYGMHWVRQAPGKGLEWVAFIRYDGSNKYYADSVKGRFTISRDNSKNTLYLQMNSLRAEDTAVYYCAKDRGLGDGTYF |
| | DYWGQGTTVTVSSGGSGGSGGSGGSGGSGGSQSALTQPASVSGSPGQSITISCSGSSSNIGNNAVNWYQQLPGKAPKLLIYYDD |
| | LLPSGVSDRFSGSKSGTSAFLAISGLQSEDEADYYCAAWDDSLNGPVFGGGTKLTVL |
| 342 | AIG-2scFv-20 Chain2: |
| | DIVMTQSPATLSLSPGERATLSCRSSKSLQNVNGNTYLYWFQQKPGQSPQLLIYRMSNLNSGVPDRFSGSGSGTEFTLTISSLE |
| | PEDFAVYYCMQHLEYPITFGAGTKLEIKRTVAAPSVFIFPPSDEQLKSGTASVVCLLNNFYPREAKVQWKVDNALQSGNSQESV |
| | TEQDSKDSTYSLSSTLTLSKADYEKHKVYACEVTHQGLSSPVTKSFNRGEC |
| 343 | AIG-2scFv-20 Chain3: |
| | EVQLVESGGGLVKPGGSLKLSCAASGYTFTSYVMHWVRQAPGKGLEWIGYINPYNDGTKYNEKFQGRVTISSDKSISTAYMELS |
| | SLRSEDTAMYYCARGTYYYGTRVFDYWGQGTLVTVSSASTKGPSVFPLAPSSKSTSGGTAALGCLVKDYFPEPVTVSWNSGALT |
| | SGVHTFPAVLQSSGLYSLSSVVTVPSSSLGTQTYICNVNHKPSNTKVDKKVEPKSCDKTHTCPPCPAPEFEGGPSVFLFPPKPK |
| | DTLMISRTPEVTCVVVAVSHEDPEVKFNWYVDGVEVHNAKTKPREEQYGSTYRVVSVLTVLHQDWLNGKEYKCKVSNKALPAPI |
| | EKTISKAKGQPREPQVYTLPPSREEMTKNQVSLSCAVKGFYPSDIAVEWESNGQPENNYKTTPPVLDSDGSFFLVSKLTVDKSR |
| | WQQGNVFSCSVMHEALHNHYTQKSLSLSPGGGGGSGGGGSGGGGSGGGGSGGGGSGGGGSDIVLTQSPASLAVSLGQRATISCK |
| | ASQSVDFDGDSFMNWYQQKPGQPPKLLIYTTSNLESGIPARFSASGSGTDFTLNIHPVEEEDTATYYCQQSNEDPYTFGGGTKL |
| | ELKGGSGGSGGSGGSGGSGGSGGSQVTLKESGPGILQPSQTLSLTCSFSGFSLRTSGMGVGWIRQPSGKGLEWLAHIWWDDDKR |
| | YNPALKSRLTISKDTSSNQVFLKIASVDTADTATYYCAQINPAWFAYWGQGTLVTVSA |
| 344 | AIG-2scFv-21 Chain1: |
| | EVQLVESGGGLVKPGGSLKLSCAASGYTFTSYVMHWVRQAPGKGLEWIGYINPYNDGTKYNEKFQGRVTISSDKSISTAYMELS |
| | SLRSEDTAMYYCARGTYYYGTRVFDYWGQGTLVTVSSASTKGPSVFPLAPSSKSTSGGTAALGCLVKDYFPEPVTVSWNSGALT |
| | SGVHTFPAVLQSSGLYSLSSVVTVPSSSLGTQTYICNVNHKPSNTKVDKKVEPKSCDKTHTCPPCPAPEFEGGPSVFLFPPKPK |
| | DTLMISRTPEVTCVVVAVSHEDPEVKFNWYVDGVEVHNAKTKPREEQYGSTYRVVSVLTVLHQDWLNGKEYKCKVSNKALPAPI |
| | EKTISKAKGQPREPQVYTLPPSREEMTKNQVSLWCLVKGFYPSDIAVEWESNGQPENNYKTTPPVLDSDGSFFLYSKLTVDKSR |
| | WQQGNVFSCSVMHEALHNHYTQKSLSLSPGGGGGSGGGGSGGGGSGGGGSGGGGSGGGGSQVQLQQWGAGLLKPSETLSLTCAV |
| | YGGSFSGYYWSWIRQPPGKGLEWIGEIDHSGSTNYNPSLKSRVTISVDTSKNQFSLKLSSVTAADTAVYYCARARGPWSFDPWG |
| | QGTLVTVSSGGSGGSGGSGGSGGSGGSDIQMTQSPSTLSASVGDRVTITCRASQSISSWLAWYQQKPGKAPKLLIYKASSLESG |
| | VPSRFSGSGSGTEFTLTISSLQPDDFATYYCQQYNSYPTFGGGTKVEIK |
| 345 | AIG-2scFv-21 Chain2: |
| | DIVMTQSPATLSLSPGERATLSCRSSKSLQNVNGNTYLYWFQQKPGQSPQLLIYRMSNLNSGVPDRFSGSGSGTEFTLTISSLE |
| | PEDFAVYYCMQHLEYPITFGAGTKLEIKRTVAAPSVFIFPPSDEQLKSGTASVVCLLNNFYPREAKVQWKVDNALQSGNSQESV |
| | TEQDSKDSTYSLSSTLTLSKADYEKHKVYACEVTHQGLSSPVTKSFNRGEC |
| 346 | AIG-2scFv-21 Chain3: |
| | EVQLVESGGGLVKPGGSLKLSCAASGYTFTSYVMHWVRQAPGKGLEWIGYINPYNDGTKYNEKFQGRVTISSDKSISTAYMELS |
| | SLRSEDTAMYYCARGTYYYGTRVFDYWGQGTLVTVSSASTKGPSVFPLAPSSKSTSGGTAALGCLVKDYFPEPVTVSWNSGALT |
| | SGVHTFPAVLQSSGLYSLSSVVTVPSSSLGTQTYICNVNHKPSNTKVDKKVEPKSCDKTHTCPPCPAPEFEGGPSVFLFPPKPK |
| | DTLMISRTPEVTCVVVAVSHEDPEVKFNWYVDGVEVHNAKTKPREEQYGSTYRVVSVLTVLHQDWLNGKEYKCKVSNKALPAPI |
| | EKTISKAKGQPREPQVYTLPPSREEMTKNQVSLSCAVKGFYPSDIAVEWESNGQPENNYKTTPPVLDSDGSFFLVSKLTVDKSR |
| | WQQGNVFSCSVMHEALHNHYTQKSLSLSPGGGGGSGGGGSGGGGSGGGGSGGGGSGGGGSDIVLTQSPASLAVSLGQRATISCK |
| | ASQSVDFDGDSFMNWYQQKPGQPPKLLIYTTSNLESGIPARFSASGSGTDFTLNIHPVEEEDTATYYCQQSNEDPYTFGGGTKL |
| | ELKGGSGGSGGSGGSGGSGGSGGSQVTLKESGPGILQPSQTLSLTCSFSGFSLRTSGMGVGWIRQPSGKGLEWLAHIWWDDDKR |
| | YNPALKSRLTISKDTSSNQVFLKIASVDTADTATYYCAQINPAWFAYWGQGTLVTVSA |
| 347 | AIG-2scFv-22 Chain1: |
| | EVQLVESGGGLVKPGGSLKLSCAASGYTFTSYVMHWVRQAPGKGLEWIGYINPYNDGTKYNEKFQGRVTISSDKSISTAYMELS |
| | SLRSEDTAMYYCARGTYYYGTRVFDYWGQGTLVTVSSASTKGPSVFPLAPSSKSTSGGTAALGCLVKDYFPEPVTVSWNSGALT |
| | SGVHTFPAVLQSSGLYSLSSVVTVPSSSLGTQTYICNVNHKPSNTKVDKKVEPKSCDKTHTCPPCPAPEFEGGPSVFLFPPKPK |
| | DTLMISRTPEVTCVVVAVSHEDPEVKFNWYVDGVEVHNAKTKPREEQYGSTYRVVSVLTVLHQDWLNGKEYKCKVSNKALPAPI |
| | EKTISKAKGQPREPQVYTLPPSREEMTKNQVSLWCLVKGFYPSDIAVEWESNGQPENNYKTTPPVLDSDGSFFLYSKLTVDKSR |
| | WQQGNVFSCSVMHEALHNHYTQKSLSLSPGGGGGSGGGGSGGGGSGGGGSGGGGSGGGGSQVQLQQSGPELVKPGASVKMSCKA |
| | SGYTFTDYVINWGKQRSGQGLEWIGEIYPGSGTNYYNEKFKAKATLTADKSSNIAYMQLSSLTSEDSAVYFCARRGRYGLYAMD |
| | YWGQGTSVTVSSGGSGGSGGSGGSGGSGGSDIQMTQTTSSLSASLGDRVTISCRASQDISNYLNWYQQKPDGTVKLLIYYTSRL |
| | HSGVPSRFSGSGSGTDYSLTINNLEQEDIATYFCQQGNTRPWTFGGGTKLEIK |
| 348 | AIG-2scFv-22 Chain2: |
| | DIVMTQSPATLSLSPGERATLSCRSSKSLQNVNGNTYLYWFQQKPGQSPQLLIYRMSNLNSGVPDRFSGSGSGTEFTLTISSLE |
| | PEDFAVYYCMQHLEYPITFGAGTKLEIKRTVAAPSVFIFPPSDEQLKSGTASVVCLLNNFYPREAKVQWKVDNALQSGNSQESV |
| | TEQDSKDSTYSLSSTLTLSKADYEKHKVYACEVTHQGLSSPVTKSFNRGEC |
| 349 | AIG-2scFv-22 Chain3: |
| | EVQLVESGGGLVKPGGSLKLSCAASGYTFTSYVMHWVRQAPGKGLEWIGYINPYNDGTKYNEKFQGRVTISSDKSISTAYMELS |
| | SLRSEDTAMYYCARGTYYYGTRVFDYWGQGTLVTVSSASTKGPSVFPLAPSSKSTSGGTAALGCLVKDYFPEPVTVSWNSGALT |
| | SGVHTFPAVLQSSGLYSLSSVVTVPSSSLGTQTYICNVNHKPSNTKVDKKVEPKSCDKTHTCPPCPAPEFEGGPSVFLFPPKPK |
| | DTLMISRTPEVTCVVVAVSHEDPEVKFNWYVDGVEVHNAKTKPREEQYGSTYRVVSVLTVLHQDWLNGKEYKCKVSNKALPAPI |
| | EKTISKAKGQPREPQVYTLPPSREEMTKNQVSLSCAVKGFYPSDIAVEWESNGQPENNYKTTPPVLDSDGSFFLVSKLTVDKSR |
| | WQQGNVFSCSVMHEALHNHYTQKSLSLSPGGGGGSGGGGSGGGGSGGGGSGGGGSGGGGSDIVLTQSPASLAVSLGQRATISCK |
| | ASQSVDFDGDSFMNWYQQKPGQPPKLLIYTTSNLESGIPARFSASGSGTDFTLNIHPVEEEDTATYYCQQSNEDPYTFGGGTKL |
| | ELKGGSGGSGGSGGSGGSGGSGGSQVTLKESGPGILQPSQTLSLTCSFSGFSLRTSGMGVGWIRQPSGKGLEWLAHIWWDDDKR |
| | YNPALKSRLTISKDTSSNQVFLKIASVDTADTATYYCAQINPAWFAYWGQGTLVTVSA |
| 350 | AIG-2scFv-23 Chain1: |
| | EVQLVESGGGLVKPGGSLKLSCAASGYTFTSYVMHWVRQAPGKGLEWIGYINPYNDGTKYNEKFQGRVTISSDKSISTAYMELS |
| | SLRSEDTAMYYCARGTYYYGTRVFDYWGQGTLVTVSSASTKGPSVFPLAPSSKSTSGGTAALGCLVKDYFPEPVTVSWNSGALT |
| | SGVHTFPAVLQSSGLYSLSSVVTVPSSSLGTQTYICNVNHKPSNTKVDKKVEPKSCDKTHTCPPCPAPEFEGGPSVFLFPPKPK |
| | DTLMISRTPEVTCVVVAVSHEDPEVKFNWYVDGVEVHNAKTKPREEQYGSTYRVVSVLTVLHQDWLNGKEYKCKVSNKALPAPI |
| | EKTISKAKGQPREPQVYTLPPSREEMTKNQVSLWCLVKGFYPSDIAVEWESNGQPENNYKTTPPVLDSDGSFFLYSKLTVDKSR |
| | WQQGNVFSCSVMHEALHNHYTQKSLSLSPGGGGGSGGGGSGGGGSGGGGSGGGGSGGGGSEVQLQQSGPELVKPGASVKISCKT |
| | SGYTFTEYTMHWVKQSHGKSLEWIGGISPNIGGTSYNQKFKGKATLTVDKSSSTAYMELRSLTSEDSAVYYCARRGGSFDYWGQ |
| | GTTLTVSSGGSGGSGGSGGSGGSGGSDIVMTQSPATLSVTPGDRVSLSCRASQSISDYLHWYQQKSHESPRLLIKYASQSISGI |
| | PSRFSGSGSGSDFTLSINSVEPEDVGVYYCQNGHSFPLTFGAGTKLELK |
| 351 | AIG-2scFv-23 Chain2: |
| | DIVMTQSPATLSLSPGERATLSCRSSKSLQNVNGNTYLYWFQQKPGQSPQLLIYRMSNLNSGVPDRFSGSGSGTEFTLTISSLE |
| | PEDFAVYYCMQHLEYPITFGAGTKLEIKRTVAAPSVFIFPPSDEQLKSGTASVVCLLNNFYPREAKVQWKVDNALQSGNSQESV |
| | TEQDSKDSTYSLSSTLTLSKADYEKHKVYACEVTHQGLSSPVTKSFNRGEC |
| 352 | AIG-2scFv-23 Chain3: |
| | EVQLVESGGGLVKPGGSLKLSCAASGYTFTSYVMHWVRQAPGKGLEWIGYINPYNDGTKYNEKFQGRVTISSDKSISTAYMELS |
| | SLRSEDTAMYYCARGTYYYGTRVFDYWGQGTLVTVSSASTKGPSVFPLAPSSKSTSGGTAALGCLVKDYFPEPVTVSWNSGALT |
| | SGVHTFPAVLQSSGLYSLSSVVTVPSSSLGTQTYICNVNHKPSNTKVDKKVEPKSCDKTHTCPPCPAPEFEGGPSVFLFPPKPK |
| | DTLMISRTPEVTCVVVAVSHEDPEVKFNWYVDGVEVHNAKTKPREEQYGSTYRVVSVLTVLHQDWLNGKEYKCKVSNKALPAPI |
| | EKTISKAKGQPREPQVYTLPPSREEMTKNQVSLSCAVKGFYPSDIAVEWESNGQPENNYKTTPPVLDSDGSFFLVSKLTVDKSR |
| | WQQGNVFSCSVMHEALHNHYTQKSLSLSPGGGGGSGGGGSGGGGSGGGGSGGGGSGGGGSDIVLTQSPASLAVSLGQRATISCK |
| | ASQSVDFDGDSFMNWYQQKPGQPPKLLIYTTSNLESGIPARFSASGSGTDFTLNIHPVEEEDTATYYCQQSNEDPYTFGGGTKL |
| | ELKGGSGGSGGSGGSGGSGGSGGSQVTLKESGPGILQPSQTLSLTCSFSGFSLRTSGMGVGWIRQPSGKGLEWLAHIWWDDDKR |
| | YNPALKSRLTISKDTSSNQVFLKIASVDTADTATYYCAQINPAWFAYWGQGTLVTVSA |
| 353 | IG-scDb-1 Chain1: |
| | EVQLVESGGGLVKPGGSLKLSCAASGYTFTSYVMHWVRQAPGKGLEWIGYINPYNDGTKYNEKFQGRVTISSDKSISTAYMELS |
| | SLRSEDTAMYYCARGTYYYGTRVFDYWGQGTLVTVSSASTKGPSVFPLAPSSKSTSGGTAALGCLVKDYFPEPVTVSWNSGALT |
| | SGVHTFPAVLQSSGLYSLSSVVTVPSSSLGTQTYICNVNHKPSNTKVDKKVEPKSCDKTHTCPPCPAPEFEGGPSVFLFPPKPK |
| | DTLMISRTPEVTCVVVAVSHEDPEVKFNWYVDGVEVHNAKTKPREEQYGSTYRVVSVLTVLHQDWLNGKEYKCKVSNKALPAPI |
| | EKTISKAKGQPREPQVYTLPPSREEMTKNQVSLTCLVKGFYPSDIAVEWESNGQPENNYKTTPPVLDSDGSFFLYSKLTVDKSR |
| | WQQGNVFSCSVMHEALHNHYTQKSLSLSPGGGGGSGGGGSSYELTQPLSVSVALGQTARITCGGHNIGSKNVHWYQQKPGQAPV |
| | LVIYQDNKRPSGIPERFSGSNSGNTATLTISRAQAGDEADYYCQVWDNYNVLFGCGTKLTVLGGSGGSQVQLVESGGGLVKPGG |
| | SLRLSCAASGFTFSSYGMHWVRQAPGKGLEWVAFIRYDGSNKYYADSVKGRFTISRDNSKNTLYLQMNSLRAEDTAVYYCAKDR |
| | GLGDGTYFDYWGQGTTVTVSSGGSGGSGGSGGSGGSGGSQSALTQPASVSGSPGQSITISCSGSSSNIGNNAVNWYQQLPGKAP |
| | KLLIYYDDLLPSGVSDRFSGSKSGTSAFLAISGLQSEDEADYYCAAWDDSLNGPVFGGGTKLTVLGGSGGSQVQLVQSGAEVKK |
| | PGASVKVSCKASGYTFTSYYMHWVRQAPGQCLEWMGAIEPTYGSTSYAQKFQGRVTMTRDTSTSTVYMELSSLRSEDTAVYYCA |
| | RGSAYYYDFADYWGQGTLVTVSS |
| 354 | IG-scDb-1 Chain2: |
| | DIVMTQSPATLSLSPGERATLSCRSSKSLQNVNGNTYLYWFQQKPGQSPQLLIYRMSNLNSGVPDRFSGSGSGTEFTLTISSLE |
| | PEDFAVYYCMQHLEYPITFGAGTKLEIKRTVAAPSVFIFPPSDEQLKSGTASVVCLLNNFYPREAKVQWKVDNALQSGNSQESV |
| | TEQDSKDSTYSLSSTLTLSKADYEKHKVYACEVTHQGLSSPVTKSFNRGEC |
| 355 | IG-scDb-2 Chain1: |
| | EVQLVESGGGLVKPGGSLKLSCAASGYTFTSYVMHWVRQAPGKGLEWIGYINPYNDGTKYNEKFQGRVTISSDKSISTAYMELS |
| | SLRSEDTAMYYCARGTYYYGTRVFDYWGQGTLVTVSSASTKGPSVFPLAPSSKSTSGGTAALGCLVKDYFPEPVTVSWNSGALT |
| | SGVHTFPAVLQSSGLYSLSSVVTVPSSSLGTQTYICNVNHKPSNTKVDKKVEPKSCDKTHTCPPCPAPEFEGGPSVFLFPPKPK |
| | DTLMISRTPEVTCVVVAVSHEDPEVKFNWYVDGVEVHNAKTKPREEQYGSTYRVVSVLTVLHQDWLNGKEYKCKVSNKALPAPI |
| | EKTISKAKGQPREPQVYTLPPSREEMTKNQVSLTCLVKGFYPSDIAVEWESNGQPENNYKTTPPVLDSDGSFFLYSKLTVDKSR |
| | WQQGNVFSCSVMHEALHNHYTQKSLSLSPGGGGGSGGGGSSYELTQPLSVSVALGQTARITCGGHNIGSKNVHWYQQKPGQAPV |
| | LVIYQDNKRPSGIPERFSGSNSGNTATLTISRAQAGDEADYYCQVWDNYNVLFGCGTKLTVLGGSGGSQVQLQQWGAGLLKPSE |
| | TLSLTCAVYGGSFSGYYWSWIRQPPGKGLEWIGEIDHSGSTNYNPSLKSRVTISVDTSKNQFSLKLSSVTAADTAVYYCARARG |
| | PWSFDPWGQGTLVTVSSGGSGGSGGSGGSGGSGGSDIQMTQSPSTLSASVGDRVTITCRASQSISSWLAWYQQKPGKAPKLLIY |
| | KASSLESGVPSRFSGSGSGTEFTLTISSLQPDDFATYYCQQYNSYPTFGGGTKVEIKGGSGGSQVQLVQSGAEVKKPGASVKVS |
| | CKASGYTFTSYYMHWVRQAPGQCLEWMGAIEPTYGSTSYAQKFQGRVTMTRDTSTSTVYMELSSLRSEDTAVYYCARGSAYYYD |
| | FADYWGQGTLVTVSS |
| 356 | IG-scDb-2 Chain2: |
| | DIVMTQSPATLSLSPGERATLSCRSSKSLQNVNGNTYLYWFQQKPGQSPQLLIYRMSNLNSGVPDRFSGSGSGTEFTLTISSLE |
| | PEDFAVYYCMQHLEYPITFGAGTKLEIKRTVAAPSVFIFPPSDEQLKSGTASVVCLLNNFYPREAKVQWKVDNALQSGNSQESV |
| | TEQDSKDSTYSLSSTLTLSKADYEKHKVYACEVTHQGLSSPVTKSFNRGEC |
| 357 | IG-scDb-3 Chain1: |
| | EVQLVESGGGLVKPGGSLKLSCAASGYTFTSYVMHWVRQAPGKGLEWIGYINPYNDGTKYNEKFQGRVTISSDKSISTAYMELS |
| | SLRSEDTAMYYCARGTYYYGTRVFDYWGQGTLVTVSSASTKGPSVFPLAPSSKSTSGGTAALGCLVKDYFPEPVTVSWNSGALT |
| | SGVHTFPAVLQSSGLYSLSSVVTVPSSSLGTQTYICNVNHKPSNTKVDKKVEPKSCDKTHTCPPCPAPEFEGGPSVFLFPPKPK |
| | DTLMISRTPEVTCVVVAVSHEDPEVKFNWYVDGVEVHNAKTKPREEQYGSTYRVVSVLTVLHQDWLNGKEYKCKVSNKALPAPI |
| | EKTISKAKGQPREPQVYTLPPSREEMTKNQVSLTCLVKGFYPSDIAVEWESNGQPENNYKTTPPVLDSDGSFFLYSKLTVDKSR |
| | WQQGNVFSCSVMHEALHNHYTQKSLSLSPGGGGGSGGGGSSYELTQPLSVSVALGQTARITCGGHNIGSKNVHWYQQKPGQAPV |
| | LVIYQDNKRPSGIPERFSGSNSGNTATLTISRAQAGDEADYYCQVWDNYNVLFGCGTKLTVLGGSGGSQVQLQQSGPELVKPGA |
| | SVKMSCKASGYTFTDYVINWGKQRSGQGLEWIGEIYPGSGTNYYNEKFKAKATLTADKSSNIAYMQLSSLTSEDSAVYFCARRG |
| | RYGLYAMDYWGQGTSVTVSSGGSGGSGGSGGSGGSGGSDIQMTQTTSSLSASLGDRVTISCRASQDISNYLNWYQQKPDGTVKL |
| | LIYYTSRLHSGVPSRFSGSGSGTDYSLTINNLEQEDIATYFCQQGNTRPWTFGGGTKLEIKGGSGGSQVQLVQSGAEVKKPGAS |
| | VKVSCKASGYTFTSYYMHWVRQAPGQCLEWMGAIEPTYGSTSYAQKFQGRVTMTRDTSTSTVYMELSSLRSEDTAVYYCARGSA |
| | YYYDFADYWGQGTLVTVSS |
| 358 | IG-scDb-3 Chain2: |
| | DIVMTQSPATLSLSPGERATLSCRSSKSLQNVNGNTYLYWFQQKPGQSPQLLIYRMSNLNSGVPDRFSGSGSGTEFTLTISSLE |
| | PEDFAVYYCMQHLEYPITFGAGTKLEIKRTVAAPSVFIFPPSDEQLKSGTASVVCLLNNFYPREAKVQWKVDNALQSGNSQESV |
| | TEQDSKDSTYSLSSTLTLSKADYEKHKVYACEVTHQGLSSPVTKSFNRGEC |
| 359 | IG-scDb-4 Chain1: |
| | EVQLVESGGGLVKPGGSLKLSCAASGYTFTSYVMHWVRQAPGKGLEWIGYINPYNDGTKYNEKFQGRVTISSDKSISTAYMELS |
| | SLRSEDTAMYYCARGTYYYGTRVFDYWGQGTLVTVSSASTKGPSVFPLAPSSKSTSGGTAALGCLVKDYFPEPVTVSWNSGALT |
| | SGVHTFPAVLQSSGLYSLSSVVTVPSSSLGTQTYICNVNHKPSNTKVDKKVEPKSCDKTHTCPPCPAPEFEGGPSVFLFPPKPK |
| | DTLMISRTPEVTCVVVAVSHEDPEVKFNWYVDGVEVHNAKTKPREEQYGSTYRVVSVLTVLHQDWLNGKEYKCKVSNKALPAPI |
| | EKTISKAKGQPREPQVYTLPPSREEMTKNQVSLTCLVKGFYPSDIAVEWESNGQPENNYKTTPPVLDSDGSFFLYSKLTVDKSR |
| | WQQGNVFSCSVMHEALHNHYTQKSLSLSPGGGGGSGGGGSSYELTQPLSVSVALGQTARITCGGHNIGSKNVHWYQQKPGQAPV |
| | LVIYQDNKRPSGIPERFSGSNSGNTATLTISRAQAGDEADYYCQVWDNYNVLFGCGTKLTVLGGSGGSEVQLQQSGPELVKPGA |
| | SVKISCKTSGYTFTEYTMHWVKQSHGKSLEWIGGISPNIGGTSYNQKFKGKATLTVDKSSSTAYMELRSLTSEDSAVYYCARRG |
| | GSFDYWGQGTTLTVSSGGSGGSGGSGGSGGSGGSDIVMTQSPATLSVTPGDRVSLSCRASQSISDYLHWYQQKSHESPRLLIKY |
| | ASQSISGIPSRFSGSGSGSDFTLSINSVEPEDVGVYYCQNGHSFPLTFGAGTKLELKGGSGGSQVQLVQSGAEVKKPGASVKVS |
| | CKASGYTFTSYYMHWVRQAPGQCLEWMGAIEPTYGSTSYAQKFQGRVTMTRDTSTSTVYMELSSLRSEDTAVYYCARGSAYYYD |
| | FADYWGQGTLVTVSS |
| 360 | IG-scDb-4 Chain2: |
| | DIVMTQSPATLSLSPGERATLSCRSSKSLQNVNGNTYLYWFQQKPGQSPQLLIYRMSNLNSGVPDRFSGSGSGTEFTLTISSLE |
| | PEDFAVYYCMQHLEYPITFGAGTKLEIKRTVAAPSVFIFPPSDEQLKSGTASVVCLLNNFYPREAKVQWKVDNALQSGNSQESV |
| | TEQDSKDSTYSLSSTLTLSKADYEKHKVYACEVTHQGLSSPVTKSFNRGEC |
| 361 | IG-scDb-5 Chain1: |
| | EVQLVESGGGLVKPGGSLKLSCAASGYTFTSYVMHWVRQAPGKGLEWIGYINPYNDGTKYNEKFQGRVTISSDKSISTAYMELS |
| | SLRSEDTAMYYCARGTYYYGTRVFDYWGQGTLVTVSSASTKGPSVFPLAPSSKSTSGGTAALGCLVKDYFPEPVTVSWNSGALT |
| | SGVHTFPAVLQSSGLYSLSSVVTVPSSSLGTQTYICNVNHKPSNTKVDKKVEPKSCDKTHTCPPCPAPEFEGGPSVFLFPPKPK |
| | DTLMISRTPEVTCVVVAVSHEDPEVKFNWYVDGVEVHNAKTKPREEQYGSTYRVVSVLTVLHQDWLNGKEYKCKVSNKALPAPI |
| | EKTISKAKGQPREPQVYTLPPSREEMTKNQVSLTCLVKGFYPSDIAVEWESNGQPENNYKTTPPVLDSDGSFFLYSKLTVDKSR |
| | WQQGNVFSCSVMHEALHNHYTQKSLSLSPGGGGGSGGGGSDIVLTQSPASLAVSLGQRATISCKASQSVDFDGDSFMNWYQQKP |
| | GQPPKLLIYTTSNLESGIPARFSASGSGTDFTLNIHPVEEEDTATYYCQQSNEDPYTFGGGTKLELKGGSGGSQVQLVESGGGL |
| | VKPGGSLRLSCAASGFTFSSYGMHWVRQAPGKGLEWVAFIRYDGSNKYYADSVKGRFTISRDNSKNTLYLQMNSLRAEDTAVYY |
| | CAKDRGLGDGTYFDYWGQGTTVTVSSGGSGGSGGSGGSGGSGGSQSALTQPASVSGSPGQSITISCSGSSSNIGNNAVNWYQQL |
| | PGKAPKLLIYYDDLLPSGVSDRFSGSKSGTSAFLAISGLQSEDEADYYCAAWDDSLNGPVFGGGTKLTVLGGSGGSQVTLKESG |
| | PGILQPSQTLSLTCSFSGFSLRTSGMGVGWIRQPSGKGLEWLAHIWWDDDKRYNPALKSRLTISKDTSSNQVFLKIASVDTADT |
| | ATYYCAQINPAWFAYWGQGTLVTVSA |
| 362 | IG-scDb-5 Chain2: |
| | DIVMTQSPATLSLSPGERATLSCRSSKSLQNVNGNTYLYWFQQKPGQSPQLLIYRMSNLNSGVPDRFSGSGSGTEFTLTISSLE |
| | PEDFAVYYCMQHLEYPITFGAGTKLEIKRTVAAPSVFIFPPSDEQLKSGTASVVCLLNNFYPREAKVQWKVDNALQSGNSQESV |
| | TEQDSKDSTYSLSSTLTLSKADYEKHKVYACEVTHQGLSSPVTKSFNRGEC |
| 363 | IG-scDb-6 Chain1: |
| | EVQLVESGGGLVKPGGSLKLSCAASGYTFTSYVMHWVRQAPGKGLEWIGYINPYNDGTKYNEKFQGRVTISSDKSISTAYMELS |
| | SLRSEDTAMYYCARGTYYYGTRVFDYWGQGTLVTVSSASTKGPSVFPLAPSSKSTSGGTAALGCLVKDYFPEPVTVSWNSGALT |
| | SGVHTFPAVLQSSGLYSLSSVVTVPSSSLGTQTYICNVNHKPSNTKVDKKVEPKSCDKTHTCPPCPAPEFEGGPSVFLFPPKPK |
| | DTLMISRTPEVTCVVVAVSHEDPEVKFNWYVDGVEVHNAKTKPREEQYGSTYRVVSVLTVLHQDWLNGKEYKCKVSNKALPAPI |
| | EKTISKAKGQPREPQVYTLPPSREEMTKNQVSLTCLVKGFYPSDIAVEWESNGQPENNYKTTPPVLDSDGSFFLYSKLTVDKSR |
| | WQQGNVFSCSVMHEALHNHYTQKSLSLSPGGGGGSGGGGSDIVLTQSPASLAVSLGQRATISCKASQSVDFDGDSFMNWYQQKP |
| | GQPPKLLIYTTSNLESGIPARFSASGSGTDFTLNIHPVEEEDTATYYCQQSNEDPYTFGGGTKLELKGGSGGSQVQLQQWGAGL |
| | LKPSETLSLTCAVYGGSFSGYYWSWIRQPPGKGLEWIGEIDHSGSTNYNPSLKSRVTISVDTSKNQFSLKLSSVTAADTAVYYC |
| | ARARGPWSFDPWGQGTLVTVSSGGSGGSGGSGGSGGSGGSDIQMTQSPSTLSASVGDRVTITCRASQSISSWLAWYQQKPGKAP |
| | KLLIYKASSLESGVPSRFSGSGSGTEFTLTISSLQPDDFATYYCQQYNSYPTFGGGTKVEIKGGSGGSQVTLKESGPGILQPSQ |
| | TLSLTCSFSGFSLRTSGMGVGWIRQPSGKGLEWLAHIWWDDDKRYNPALKSRLTISKDTSSNQVFLKIASVDTADTATYYCAQI |
| | NPAWFAYWGQGTLVTVSA |
| 364 | IG-scDb-6 Chain2: |
| | DIVMTQSPATLSLSPGERATLSCRSSKSLQNVNGNTYLYWFQQKPGQSPQLLIYRMSNLNSGVPDRFSGSGSGTEFTLTISSLE |
| | PEDFAVYYCMQHLEYPITFGAGTKLEIKRTVAAPSVFIFPPSDEQLKSGTASVVCLLNNFYPREAKVQWKVDNALQSGNSQESV |
| | TEQDSKDSTYSLSSTLTLSKADYEKHKVYACEVTHQGLSSPVTKSFNRGEC |
| 365 | IG-scDb-7 Chain1: |
| | EVQLVESGGGLVKPGGSLKLSCAASGYTFTSYVMHWVRQAPGKGLEWIGYINPYNDGTKYNEKFQGRVTISSDKSISTAYMELS |
| | SLRSEDTAMYYCARGTYYYGTRVFDYWGQGTLVTVSSASTKGPSVFPLAPSSKSTSGGTAALGCLVKDYFPEPVTVSWNSGALT |
| | SGVHTFPAVLQSSGLYSLSSVVTVPSSSLGTQTYICNVNHKPSNTKVDKKVEPKSCDKTHTCPPCPAPEFEGGPSVFLFPPKPK |
| | DTLMISRTPEVTCVVVAVSHEDPEVKFNWYVDGVEVHNAKTKPREEQYGSTYRVVSVLTVLHQDWLNGKEYKCKVSNKALPAPI |
| | EKTISKAKGQPREPQVYTLPPSREEMTKNQVSLTCLVKGFYPSDIAVEWESNGQPENNYKTTPPVLDSDGSFFLYSKLTVDKSR |
| | WQQGNVFSCSVMHEALHNHYTQKSLSLSPGGGGGSGGGGSDIVLTQSPASLAVSLGQRATISCKASQSVDFDGDSFMNWYQQKP |
| | GQPPKLLIYTTSNLESGIPARFSASGSGTDFTLNIHPVEEEDTATYYCQQSNEDPYTFGGGTKLELKGGSGGSQVQLQQSGPEL |
| | VKPGASVKMSCKASGYTFTDYVINWGKQRSGQGLEWIGEIYPGSGTNYYNEKFKAKATLTADKSSNIAYMQLSSLTSEDSAVYF |
| | CARRGRYGLYAMDYWGQGTSVTVSSGGSGGSGGSGGSGGSGGSDIQMTQTTSSLSASLGDRVTISCRASQDISNYLNWYQQKPD |
| | GTVKLLIYYTSRLHSGVPSRFSGSGSGTDYSLTINNLEQEDIATYFCQQGNTRPWTFGGGTKLEIKGGSGGSQVTLKESGPGIL |
| | QPSQTLSLTCSFSGFSLRTSGMGVGWIRQPSGKGLEWLAHIWWDDDKRYNPALKSRLTISKDTSSNQVFLKIASVDTADTATYY |
| | CAQINPAWFAYWGQGTLVTVSA |
| 366 | IG-scDb-7 Chain2: |
| | DIVMTQSPATLSLSPGERATLSCRSSKSLQNVNGNTYLYWFQQKPGQSPQLLIYRMSNLNSGVPDRFSGSGSGTEFTLTISSLE |
| | PEDFAVYYCMQHLEYPITFGAGTKLEIKRTVAAPSVFIFPPSDEQLKSGTASVVCLLNNFYPREAKVQWKVDNALQSGNSQESV |
| | TEQDSKDSTYSLSSTLTLSKADYEKHKVYACEVTHQGLSSPVTKSFNRGEC |
| 367 | IG-scDb-8 Chain1: |
| | EVQLVESGGGLVKPGGSLKLSCAASGYTFTSYVMHWVRQAPGKGLEWIGYINPYNDGTKYNEKFQGRVTISSDKSISTAYMELS |
| | SLRSEDTAMYYCARGTYYYGTRVFDYWGQGTLVTVSSASTKGPSVFPLAPSSKSTSGGTAALGCLVKDYFPEPVTVSWNSGALT |
| | SGVHTFPAVLQSSGLYSLSSVVTVPSSSLGTQTYICNVNHKPSNTKVDKKVEPKSCDKTHTCPPCPAPEFEGGPSVFLFPPKPK |
| | DTLMISRTPEVTCVVVAVSHEDPEVKFNWYVDGVEVHNAKTKPREEQYGSTYRVVSVLTVLHQDWLNGKEYKCKVSNKALPAPI |
| | EKTISKAKGQPREPQVYTLPPSREEMTKNQVSLTCLVKGFYPSDIAVEWESNGQPENNYKTTPPVLDSDGSFFLYSKLTVDKSR |
| | WQQGNVFSCSVMHEALHNHYTQKSLSLSPGGGGGSGGGGSDIVLTQSPASLAVSLGQRATISCKASQSVDFDGDSFMNWYQQKP |
| | GQPPKLLIYTTSNLESGIPARFSASGSGTDFTLNIHPVEEEDTATYYCQQSNEDPYTFGGGTKLELKGGSGGSEVQLQQSGPEL |
| | VKPGASVKISCKTSGYTFTEYTMHWVKQSHGKSLEWIGGISPNIGGTSYNQKFKGKATLTVDKSSSTAYMELRSLTSEDSAVYY |
| | CARRGGSFDYWGQGTTLTVSSGGSGGSGGSGGSGGSGGSDIVMTQSPATLSVTPGDRVSLSCRASQSISDYLHWYQQKSHESPR |
| | LLIKYASQSISGIPSRFSGSGSGSDFTLSINSVEPEDVGVYYCQNGHSFPLTFGAGTKLELKGGSGGSQVTLKESGPGILQPSQ |
| | TLSLTCSFSGFSLRTSGMGVGWIRQPSGKGLEWLAHIWWDDDKRYNPALKSRLTISKDTSSNQVFLKIASVDTADTATYYCAQI |
| | NPAWFAYWGQGTLVTVSA |
| 368 | IG-scDb-8 Chain2: |
| | DIVMTQSPATLSLSPGERATLSCRSSKSLQNVNGNTYLYWFQQKPGQSPQLLIYRMSNLNSGVPDRFSGSGSGTEFTLTISSLE |
| | PEDFAVYYCMQHLEYPITFGAGTKLEIKRTVAAPSVFIFPPSDEQLKSGTASVVCLLNNFYPREAKVQWKVDNALQSGNSQESV |
| | TEQDSKDSTYSLSSTLTLSKADYEKHKVYACEVTHQGLSSPVTKSFNRGEC |
| 369 | AIG-2scDb-1 Chain1: |
| | EVQLVESGGGLVKPGGSLKLSCAASGYTFTSYVMHWVRQAPGKGLEWIGYINPYNDGTKYNEKFQGRVTISSDKSISTAYMELS |
| | SLRSEDTAMYYCARGTYYYGTRVFDYWGQGTLVTVSSASTKGPSVFPLAPSSKSTSGGTAALGCLVKDYFPEPVTVSWNSGALT |
| | SGVHTFPAVLQSSGLYSLSSVVTVPSSSLGTQTYICNVNHKPSNTKVDKKVEPKSCDKTHTCPPCPAPEFEGGPSVFLFPPKPK |
| | DTLMISRTPEVTCVVVAVSHEDPEVKFNWYVDGVEVHNAKTKPREEQYGSTYRVVSVLTVLHQDWLNGKEYKCKVSNKALPAPI |
| | EKTISKAKGQPREPQVYTLPPSREEMTKNQVSLWCLVKGFYPSDIAVEWESNGQPENNYKTTPPVLDSDGSFFLYSKLTVDKSR |
| | WQQGNVFSCSVMHEALHNHYTQKSLSLSPGGGGGSGGGGSQSALTQPASVSGSPGQSITISCSGSSSNIGNNAVNWYQQLPGKA |
| | PKLLIYYDDLLPSGVSDRFSGSKSGTSAFLAISGLQSEDEADYYCAAWDDSLNGPVFGGGTKLTVLGGSGGSQVQLVESGGGLV |
| | KPGGSLRLSCAASGFTFSSYGMHWVRQAPGKGLEWVAFIRYDGSNKYYADSVKGRFTISRDNSKNTLYLQMNSLRAEDTAVYYC |
| | AKDRGLGDGTYFDYWGQGTTVTVSSGGSGGSGGSGGSGGSGGSQSALTQPASVSGSPGQSITISCSGSSSNIGNNAVNWYQQLP |
| | GKAPKLLIYYDDLLPSGVSDRFSGSKSGTSAFLAISGLQSEDEADYYCAAWDDSLNGPVFGGGTKLTVLGGSGGSQVQLVESGG |
| | GLVKPGGSLRLSCAASGFTFSSYGMHWVRQAPGKGLEWVAFIRYDGSNKYYADSVKGRFTISRDNSKNTLYLQMNSLRAEDTAV |
| | YYCAKDRGLGDGTYFDYWGQGTTVTVSS |
| 370 | AIG-2scDb-1 Chain2: |
| | DIVMTQSPATLSLSPGERATLSCRSSKSLQNVNGNTYLYWFQQKPGQSPQLLIYRMSNLNSGVPDRFSGSGSGTEFTLTISSLE |
| | PEDFAVYYCMQHLEYPITFGAGTKLEIKRTVAAPSVFIFPPSDEQLKSGTASVVCLLNNFYPREAKVQWKVDNALQSGNSQESV |
| | TEQDSKDSTYSLSSTLTLSKADYEKHKVYACEVTHQGLSSPVTKSFNRGEC |
| 371 | AIG-2scDb-1 Chain3: |
| | EVQLVESGGGLVKPGGSLKLSCAASGYTFTSYVMHWVRQAPGKGLEWIGYINPYNDGTKYNEKFQGRVTISSDKSISTAYMELS |
| | SLRSEDTAMYYCARGTYYYGTRVFDYWGQGTLVTVSSASTKGPSVFPLAPSSKSTSGGTAALGCLVKDYFPEPVTVSWNSGALT |
| | SGVHTFPAVLQSSGLYSLSSVVTVPSSSLGTQTYICNVNHKPSNTKVDKKVEPKSCDKTHTCPPCPAPEFEGGPSVFLFPPKPK |
| | DTLMISRTPEVTCVVVAVSHEDPEVKFNWYVDGVEVHNAKTKPREEQYGSTYRVVSVLTVLHQDWLNGKEYKCKVSNKALPAPI |
| | EKTISKAKGQPREPQVYTLPPSREEMTKNQVSLSCAVKGFYPSDIAVEWESNGQPENNYKTTPPVLDSDGSFFLVSKLTVDKSR |
| | WQQGNVFSCSVMHEALHNHYTQKSLSLSPGGGGGSGGGGSSYELTQPLSVSVALGQTARITCGGHNIGSKNVHWYQQKPGQAPV |
| | LVIYQDNKRPSGIPERFSGSNSGNTATLTISRAQAGDEADYYCQVWDNYNVLFGCGTKLTVLGGSGGSQVQLVQSGAEVKKPGA |
| | SVKVSCKASGYTFTSYYMHWVRQAPGQCLEWMGAIEPTYGSTSYAQKFQGRVTMTRDTSTSTVYMELSSLRSEDTAVYYCARGS |
| | AYYYDFADYWGQGTLVTVSSGGSGGSGGSGGSGGSGGSSYELTQPLSVSVALGQTARITCGGHNIGSKNVHWYQQKPGQAPVLV |
| | IYQDNKRPSGIPERFSGSNSGNTATLTISRAQAGDEADYYCQVWDNYNVLFGCGTKLTVLGGSGGSQVQLVQSGAEVKKPGASV |
| | KVSCKASGYTFTSYYMHWVRQAPGQCLEWMGAIEPTYGSTSYAQKFQGRVTMTRDTSTSTVYMELSSLRSEDTAVYYCARGSAY |
| | YYDFADYWGQGTLVTVSS |
| 372 | AIG-2scDb-2 Chain1: |
| | EVQLVESGGGLVKPGGSLKLSCAASGYTFTSYVMHWVRQAPGKGLEWIGYINPYNDGTKYNEKFQGRVTISSDKSISTAYMELS |
| | SLRSEDTAMYYCARGTYYYGTRVFDYWGQGTLVTVSSASTKGPSVFPLAPSSKSTSGGTAALGCLVKDYFPEPVTVSWNSGALT |
| | SGVHTFPAVLQSSGLYSLSSVVTVPSSSLGTQTYICNVNHKPSNTKVDKKVEPKSCDKTHTCPPCPAPEFEGGPSVFLFPPKPK |
| | DTLMISRTPEVTCVVVAVSHEDPEVKFNWYVDGVEVHNAKTKPREEQYGSTYRVVSVLTVLHQDWLNGKEYKCKVSNKALPAPI |
| | EKTISKAKGQPREPQVYTLPPSREEMTKNQVSLWCLVKGFYPSDIAVEWESNGQPENNYKTTPPVLDSDGSFFLYSKLTVDKSR |
| | WQQGNVFSCSVMHEALHNHYTQKSLSLSPGGGGGSGGGGSDIQMTQSPSTLSASVGDRVTITCRASQSISSWLAWYQQKPGKAP |
| | KLLIYKASSLESGVPSRFSGSGSGTEFTLTISSLQPDDFATYYCQQYNSYPTFGGGTKVEIKGGSGGSQVQLQQWGAGLLKPSE |
| | TLSLTCAVYGGSFSGYYWSWIRQPPGKGLEWIGEIDHSGSTNYNPSLKSRVTISVDTSKNQFSLKLSSVTAADTAVYYCARARG |
| | PWSFDPWGQGTLVTVSSGGSGGSGGSGGSGGSGGSDIQMTQSPSTLSASVGDRVTITCRASQSISSWLAWYQQKPGKAPKLLIY |
| | KASSLESGVPSRFSGSGSGTEFTLTISSLQPDDFATYYCQQYNSYPTFGGGTKVEIKGGSGGSQVQLQQWGAGLLKPSETLSLT |
| | CAVYGGSFSGYYWSWIRQPPGKGLEWIGEIDHSGSTNYNPSLKSRVTISVDTSKNQFSLKLSSVTAADTAVYYCARARGPWSFD |
| | PWGQGTLVTVSS |
| 373 | AIG-2scDb-2 Chain2: |
| | DIVMTQSPATLSLSPGERATLSCRSSKSLQNVNGNTYLYWFQQKPGQSPQLLIYRMSNLNSGVPDRFSGSGSGTEFTLTISSLE |
| | PEDFAVYYCMQHLEYPITFGAGTKLEIKRTVAAPSVFIFPPSDEQLKSGTASVVCLLNNFYPREAKVQWKVDNALQSGNSQESV |
| | TEQDSKDSTYSLSSTLTLSKADYEKHKVYACEVTHQGLSSPVTKSFNRGEC |
| 374 | AIG-2scDb-2 Chain3: |
| | EVQLVESGGGLVKPGGSLKLSCAASGYTFTSYVMHWVRQAPGKGLEWIGYINPYNDGTKYNEKFQGRVTISSDKSISTAYMELS |
| | SLRSEDTAMYYCARGTYYYGTRVFDYWGQGTLVTVSSASTKGPSVFPLAPSSKSTSGGTAALGCLVKDYFPEPVTVSWNSGALT |
| | SGVHTFPAVLQSSGLYSLSSVVTVPSSSLGTQTYICNVNHKPSNTKVDKKVEPKSCDKTHTCPPCPAPEFEGGPSVFLFPPKPK |
| | DTLMISRTPEVTCVVVAVSHEDPEVKFNWYVDGVEVHNAKTKPREEQYGSTYRVVSVLTVLHQDWLNGKEYKCKVSNKALPAPI |
| | EKTISKAKGQPREPQVYTLPPSREEMTKNQVSLSCAVKGFYPSDIAVEWESNGQPENNYKTTPPVLDSDGSFFLVSKLTVDKSR |
| | WQQGNVFSCSVMHEALHNHYTQKSLSLSPGGGGGSGGGGSSYELTQPLSVSVALGQTARITCGGHNIGSKNVHWYQQKPGQAPV |
| | LVIYQDNKRPSGIPERFSGSNSGNTATLTISRAQAGDEADYYCQVWDNYNVLFGCGTKLTVLGGSGGSQVQLVQSGAEVKKPGA |
| | SVKVSCKASGYTFTSYYMHWVRQAPGQCLEWMGAIEPTYGSTSYAQKFQGRVTMTRDTSTSTVYMELSSLRSEDTAVYYCARGS |
| | AYYYDFADYWGQGTLVTVSSGGSGGSGGSGGSGGSGGSSYELTQPLSVSVALGQTARITCGGHNIGSKNVHWYQQKPGQAPVLV |
| | IYQDNKRPSGIPERFSGSNSGNTATLTISRAQAGDEADYYCQVWDNYNVLFGCGTKLTVLGGSGGSQVQLVQSGAEVKKPGASV |
| | KVSCKASGYTFTSYYMHWVRQAPGQCLEWMGAIEPTYGSTSYAQKFQGRVTMTRDTSTSTVYMELSSLRSEDTAVYYCARGSAY |
| | YYDFADYWGQGTLVTVSS |
| 375 | AIG-2scDb-3 Chain1: |
| | EVQLVESGGGLVKPGGSLKLSCAASGYTFTSYVMHWVRQAPGKGLEWIGYINPYNDGTKYNEKFQGRVTISSDKSISTAYMELS |
| | SLRSEDTAMYYCARGTYYYGTRVFDYWGQGTLVTVSSASTKGPSVFPLAPSSKSTSGGTAALGCLVKDYFPEPVTVSWNSGALT |
| | SGVHTFPAVLQSSGLYSLSSVVTVPSSSLGTQTYICNVNHKPSNTKVDKKVEPKSCDKTHTCPPCPAPEFEGGPSVFLFPPKPK |
| | DTLMISRTPEVTCVVVAVSHEDPEVKFNWYVDGVEVHNAKTKPREEQYGSTYRVVSVLTVLHQDWLNGKEYKCKVSNKALPAPI |
| | EKTISKAKGQPREPQVYTLPPSREEMTKNQVSLWCLVKGFYPSDIAVEWESNGQPENNYKTTPPVLDSDGSFFLYSKLTVDKSR |
| | WQQGNVFSCSVMHEALHNHYTQKSLSLSPGGGGGSGGGGSDIQMTQTTSSLSASLGDRVTISCRASQDISNYLNWYQQKPDGTV |
| | KLLIYYTSRLHSGVPSRFSGSGSGTDYSLTINNLEQEDIATYFCQQGNTRPWTFGGGTKLEIKGGSGGSQVQLQQSGPELVKPG |
| | ASVKMSCKASGYTFTDYVINWGKQRSGQGLEWIGEIYPGSGTNYYNEKFKAKATLTADKSSNIAYMQLSSLTSEDSAVYFCARR |
| | GRYGLYAMDYWGQGTSVTVSSGGSGGSGGSGGSGGSGGSDIQMTQTTSSLSASLGDRVTISCRASQDISNYLNWYQQKPDGTVK |
| | LLIYYTSRLHSGVPSRFSGSGSGTDYSLTINNLEQEDIATYFCQQGNTRPWTFGGGTKLEIKGGSGGSQVQLQQSGPELVKPGA |
| | SVKMSCKASGYTFTDYVINWGKQRSGQGLEWIGEIYPGSGTNYYNEKFKAKATLTADKSSNIAYMQLSSLTSEDSAVYFCARRG |
| | RYGLYAMDYWGQGTSVTVSS |
| 376 | AIG-2scDb-3 Chain2: |
| | DIVMTQSPATLSLSPGERATLSCRSSKSLQNVNGNTYLYWFQQKPGQSPQLLIYRMSNLNSGVPDRFSGSGSGTEFTLTISSLE |
| | PEDFAVYYCMQHLEYPITFGAGTKLEIKRTVAAPSVFIFPPSDEQLKSGTASVVCLLNNFYPREAKVQWKVDNALQSGNSQESV |
| | TEQDSKDSTYSLSSTLTLSKADYEKHKVYACEVTHQGLSSPVTKSFNRGEC |
| 377 | AIG-2scDb-3 Chain3: |
| | EVQLVESGGGLVKPGGSLKLSCAASGYTFTSYVMHWVRQAPGKGLEWIGYINPYNDGTKYNEKFQGRVTISSDKSISTAYMELS |
| | SLRSEDTAMYYCARGTYYYGTRVFDYWGQGTLVTVSSASTKGPSVFPLAPSSKSTSGGTAALGCLVKDYFPEPVTVSWNSGALT |
| | SGVHTFPAVLQSSGLYSLSSVVTVPSSSLGTQTYICNVNHKPSNTKVDKKVEPKSCDKTHTCPPCPAPEFEGGPSVFLFPPKPK |
| | DTLMISRTPEVTCVVVAVSHEDPEVKFNWYVDGVEVHNAKTKPREEQYGSTYRVVSVLTVLHQDWLNGKEYKCKVSNKALPAPI |
| | EKTISKAKGQPREPQVYTLPPSREEMTKNQVSLSCAVKGFYPSDIAVEWESNGQPENNYKTTPPVLDSDGSFFLVSKLTVDKSR |
| | WQQGNVFSCSVMHEALHNHYTQKSLSLSPGGGGGSGGGGSSYELTQPLSVSVALGQTARITCGGHNIGSKNVHWYQQKPGQAPV |
| | LVIYQDNKRPSGIPERFSGSNSGNTATLTISRAQAGDEADYYCQVWDNYNVLFGCGTKLTVLGGSGGSQVQLVQSGAEVKKPGA |
| | SVKVSCKASGYTFTSYYMHWVRQAPGQCLEWMGAIEPTYGSTSYAQKFQGRVTMTRDTSTSTVYMELSSLRSEDTAVYYCARGS |
| | AYYYDFADYWGQGTLVTVSSGGSGGSGGSGGSGGSGGSSYELTQPLSVSVALGQTARITCGGHNIGSKNVHWYQQKPGQAPVLV |
| | IYQDNKRPSGIPERFSGSNSGNTATLTISRAQAGDEADYYCQVWDNYNVLFGCGTKLTVLGGSGGSQVQLVQSGAEVKKPGASV |
| | KVSCKASGYTFTSYYMHWVRQAPGQCLEWMGAIEPTYGSTSYAQKFQGRVTMTRDTSTSTVYMELSSLRSEDTAVYYCARGSAY |
| | YYDFADYWGQGTLVTVSS |
| 378 | AIG-2scDb-4 Chain1: |
| | EVQLVESGGGLVKPGGSLKLSCAASGYTFTSYVMHWVRQAPGKGLEWIGYINPYNDGTKYNEKFQGRVTISSDKSISTAYMELS |
| | SLRSEDTAMYYCARGTYYYGTRVFDYWGQGTLVTVSSASTKGPSVFPLAPSSKSTSGGTAALGCLVKDYFPEPVTVSWNSGALT |
| | SGVHTFPAVLQSSGLYSLSSVVTVPSSSLGTQTYICNVNHKPSNTKVDKKVEPKSCDKTHTCPPCPAPEFEGGPSVFLFPPKPK |
| | DTLMISRTPEVTCVVVAVSHEDPEVKFNWYVDGVEVHNAKTKPREEQYGSTYRVVSVLTVLHQDWLNGKEYKCKVSNKALPAPI |
| | EKTISKAKGQPREPQVYTLPPSREEMTKNQVSLWCLVKGFYPSDIAVEWESNGQPENNYKTTPPVLDSDGSFFLYSKLTVDKSR |
| | WQQGNVFSCSVMHEALHNHYTQKSLSLSPGGGGGSGGGGSDIVMTQSPATLSVTPGDRVSLSCRASQSISDYLHWYQQKSHESP |
| | RLLIKYASQSISGIPSRFSGSGSGSDFTLSINSVEPEDVGVYYCQNGHSFPLTFGAGTKLELKGGSGGSEVQLQQSGPELVKPG |
| | ASVKISCKTSGYTFTEYTMHWVKQSHGKSLEWIGGISPNIGGTSYNQKFKGKATLTVDKSSSTAYMELRSLTSEDSAVYYCARR |
| | GGSFDYWGQGTTLTVSSGGSGGSGGSGGSGGSGGSDIVMTQSPATLSVTPGDRVSLSCRASQSISDYLHWYQQKSHESPRLLIK |
| | YASQSISGIPSRFSGSGSGSDFTLSINSVEPEDVGVYYCQNGHSFPLTFGAGTKLELKGGSGGSEVQLQQSGPELVKPGASVKI |
| | SCKTSGYTFTEYTMHWVKQSHGKSLEWIGGISPNIGGTSYNQKFKGKATLTVDKSSSTAYMELRSLTSEDSAVYYCARRGGSFD |
| | YWGQGTTLTVSS |
| 379 | AIG-2scDb-4 Chain2: |
| | DIVMTQSPATLSLSPGERATLSCRSSKSLQNVNGNTYLYWFQQKPGQSPQLLIYRMSNLNSGVPDRFSGSGSGTEFTLTISSLE |
| | PEDFAVYYCMQHLEYPITFGAGTKLEIKRTVAAPSVFIFPPSDEQLKSGTASVVCLLNNFYPREAKVQWKVDNALQSGNSQESV |
| | TEQDSKDSTYSLSSTLTLSKADYEKHKVYACEVTHQGLSSPVTKSFNRGEC |
| 380 | AIG-2scDb-4 Chain3: |
| | EVQLVESGGGLVKPGGSLKLSCAASGYTFTSYVMHWVRQAPGKGLEWIGYINPYNDGTKYNEKFQGRVTISSDKSISTAYMELS |
| | SLRSEDTAMYYCARGTYYYGTRVFDYWGQGTLVTVSSASTKGPSVFPLAPSSKSTSGGTAALGCLVKDYFPEPVTVSWNSGALT |
| | SGVHTFPAVLQSSGLYSLSSVVTVPSSSLGTQTYICNVNHKPSNTKVDKKVEPKSCDKTHTCPPCPAPEFEGGPSVFLFPPKPK |
| | DTLMISRTPEVTCVVVAVSHEDPEVKFNWYVDGVEVHNAKTKPREEQYGSTYRVVSVLTVLHQDWLNGKEYKCKVSNKALPAPI |
| | EKTISKAKGQPREPQVYTLPPSREEMTKNQVSLSCAVKGFYPSDIAVEWESNGQPENNYKTTPPVLDSDGSFFLVSKLTVDKSR |
| | WQQGNVFSCSVMHEALHNHYTQKSLSLSPGGGGGSGGGGSSYELTQPLSVSVALGQTARITCGGHNIGSKNVHWYQQKPGQAPV |
| | LVIYQDNKRPSGIPERFSGSNSGNTATLTISRAQAGDEADYYCQVWDNYNVLFGCGTKLTVLGGSGGSQVQLVQSGAEVKKPGA |
| | SVKVSCKASGYTFTSYYMHWVRQAPGQCLEWMGAIEPTYGSTSYAQKFQGRVTMTRDTSTSTVYMELSSLRSEDTAVYYCARGS |
| | AYYYDFADYWGQGTLVTVSSGGSGGSGGSGGSGGSGGSSYELTQPLSVSVALGQTARITCGGHNIGSKNVHWYQQKPGQAPVLV |
| | IYQDNKRPSGIPERFSGSNSGNTATLTISRAQAGDEADYYCQVWDNYNVLFGCGTKLTVLGGSGGSQVQLVQSGAEVKKPGASV |
| | KVSCKASGYTFTSYYMHWVRQAPGQCLEWMGAIEPTYGSTSYAQKFQGRVTMTRDTSTSTVYMELSSLRSEDTAVYYCARGSAY |
| | YYDFADYWGQGTLVTVSS |
| 381 | AIG-1scDb-3 Chain1: |
| | EVQLVESGGGLVKPGGSLKLSCAASGYTFTSYVMHWVRQAPGKGLEWIGYINPYNDGTKYNEKFQGRVTISSDKSISTAYMELS |
| | SLRSEDTAMYYCARGTYYYGTRVFDYWGQGTLVTVSSASTKGPSVFPLAPSSKSTSGGTAALGCLVKDYFPEPVTVSWNSGALT |
| | SGVHTFPAVLQSSGLYSLSSVVTVPSSSLGTQTYICNVNHKPSNTKVDKKVEPKSCDKTHTCPPCPAPELLGGPSVFLFPPKPK |
| | DTLMISRTPEVTCVVVDVSHEDPEVKFNWYVDGVEVHNAKTKPREEQYNSTYRVVSVLTVLHQDWLNGKEYKCKVSNKALPAPI |
| | EKTISKAKGQPREPQVYTLPPSREEMTKNQVSLWCLVKGFYPSDIAVEWESNGQPENNYKTTPPVLDSDGSFFLYSKLTVDKSR |
| | WQQGNVFSCSVMHEALHNHYTQKSLSLSPGGGGGSGGGGSQSALTQPASVSGSPGQSITISCSGSSSNIGNNAVNWYQQLPGKA |
| | PKLLIYYDDLLPSGVSDRFSGSKSGTSAFLAISGLQSEDEADYYCAAWDDSLNGPVFGGGTKLTVLGGSGGSQVQLVESGGGLV |
| | KPGGSLRLSCAASGFTFSSYGMHWVRQAPGKGLEWVAFIRYDGSNKYYADSVKGRFTISRDNSKNTLYLQMNSLRAEDTAVYYC |
| | AKDRGLGDGTYFDYWGQGTTVTVSSGGSGGSGGSGGSGGSGGSQSALTQPASVSGSPGQSITISCSGSSSNIGNNAVNWYQQLP |
| | GKAPKLLIYYDDLLPSGVSDRFSGSKSGTSAFLAISGLQSEDEADYYCAAWDDSLNGPVFGGGTKLTVLGGSGGSQVQLVESGG |
| | GLVKPGGSLRLSCAASGFTFSSYGMHWVRQAPGKGLEWVAFIRYDGSNKYYADSVKGRFTISRDNSKNTLYLQMNSLRAEDTAV |
| | YYCAKDRGLGDGTYFDYWGQGTTVTVSS |
| 382 | AIG-1scDb-3 Chain2: |
| | DIVMTQSPATLSLSPGERATLSCRSSKSLQNVNGNTYLYWFQQKPGQSPQLLIYRMSNLNSGVPDRFSGSGSGTEFTLTISSLE |
| | PEDFAVYYCMQHLEYPITFGAGTKLEIKRTVAAPSVFIFPPSDEQLKSGTASVVCLLNNFYPREAKVQWKVDNALQSGNSQESV |
| | TEQDSKDSTYSLSSTLTLSKADYEKHKVYACEVTHQGLSSPVTKSFNRGEC |
| 383 | AIG-1scDb-3 Chain3: |
| | EVQLVESGGGLVKPGGSLKLSCAASGYTFTSYVMHWVRQAPGKGLEWIGYINPYNDGTKYNEKFQGRVTISSDKSISTAYMELS |
| | SLRSEDTAMYYCARGTYYYGTRVFDYWGQGTLVTVSSASTKGPSVFPLAPSSKSTSGGTAALGCLVKDYFPEPVTVSWNSGALT |
| | SGVHTFPAVLQSSGLYSLSSVVTVPSSSLGTQTYICNVNHKPSNTKVDKKVEPKSCDKTHTCPPCPAPELLGGPSVFLFPPKPK |
| | DTLMISRTPEVTCVVVDVSHEDPEVKFNWYVDGVEVHNAKTKPREEQYNSTYRVVSVLTVLHQDWLNGKEYKCKVSNKALPAPI |
| | EKTISKAKGQPREPQVYTLPPSREEMTKNQVSLSCAVKGFYPSDIAVEWESNGQPENNYKTTPPVLDSDGSFFLVSKLTVDKSR |
| | WQQGNVFSCSVMHEALHNHYTQKSLSLSPG |
| 384 | AIG-1scDb-4 Chain1: |
| | EVQLVESGGGLVKPGGSLKLSCAASGYTFTSYVMHWVRQAPGKGLEWIGYINPYNDGTKYNEKFQGRVTISSDKSISTAYMELS |
| | SLRSEDTAMYYCARGTYYYGTRVFDYWGQGTLVTVSSASTKGPSVFPLAPSSKSTSGGTAALGCLVKDYFPEPVTVSWNSGALT |
| | SGVHTFPAVLQSSGLYSLSSVVTVPSSSLGTQTYICNVNHKPSNTKVDKKVEPKSCDKTHTCPPCPAPELLGGPSVFLFPPKPK |
| | DTLMISRTPEVTCVVVDVSHEDPEVKFNWYVDGVEVHNAKTKPREEQYNSTYRVVSVLTVLHQDWLNGKEYKCKVSNKALPAPI |
| | EKTISKAKGQPREPQVYTLPPSREEMTKNQVSLWCLVKGFYPSDIAVEWESNGQPENNYKTTPPVLDSDGSFFLYSKLTVDKSR |
| | WQQGNVFSCSVMHEALHNHYTQKSLSLSPGGGGGSGGGGSDIQMTQSPSTLSASVGDRVTITCRASQSISSWLAWYQQKPGKAP |
| | KLLIYKASSLESGVPSRFSGSGSGTEFTLTISSLQPDDFATYYCQQYNSYPTFGGGTKVEIKGGSGGSQVQLQQWGAGLLKPSE |
| | TLSLTCAVYGGSFSGYYWSWIRQPPGKGLEWIGEIDHSGSTNYNPSLKSRVTISVDTSKNQFSLKLSSVTAADTAVYYCARARG |
| | PWSFDPWGQGTLVTVSSGGSGGSGGSGGSGGSGGSDIQMTQSPSTLSASVGDRVTITCRASQSISSWLAWYQQKPGKAPKLLIY |
| | KASSLESGVPSRFSGSGSGTEFTLTISSLQPDDFATYYCQQYNSYPTFGGGTKVEIKGGSGGSQVQLQQWGAGLLKPSETLSLT |
| | CAVYGGSFSGYYWSWIRQPPGKGLEWIGEIDHSGSTNYNPSLKSRVTISVDTSKNQFSLKLSSVTAADTAVYYCARARGPWSFD |
| | PWGQGTLVTVSS |
| 385 | AIG-1scDb-4 Chain2: |
| | DIVMTQSPATLSLSPGERATLSCRSSKSLQNVNGNTYLYWFQQKPGQSPQLLIYRMSNLNSGVPDRFSGSGSGTEFTLTISSLE |
| | PEDFAVYYCMQHLEYPITFGAGTKLEIKRTVAAPSVFIFPPSDEQLKSGTASVVCLLNNFYPREAKVQWKVDNALQSGNSQESV |
| | TEQDSKDSTYSLSSTLTLSKADYEKHKVYACEVTHQGLSSPVTKSFNRGEC |
| 386 | AIG-1scDb-4 Chain3: |
| | EVQLVESGGGLVKPGGSLKLSCAASGYTFTSYVMHWVRQAPGKGLEWIGYINPYNDGTKYNEKFQGRVTISSDKSISTAYMELS |
| | SLRSEDTAMYYCARGTYYYGTRVFDYWGQGTLVTVSSASTKGPSVFPLAPSSKSTSGGTAALGCLVKDYFPEPVTVSWNSGALT |
| | SGVHTFPAVLQSSGLYSLSSVVTVPSSSLGTQTYICNVNHKPSNTKVDKKVEPKSCDKTHTCPPCPAPELLGGPSVFLFPPKPK |
| | DTLMISRTPEVTCVVVDVSHEDPEVKFNWYVDGVEVHNAKTKPREEQYNSTYRVVSVLTVLHQDWLNGKEYKCKVSNKALPAPI |
| | EKTISKAKGQPREPQVYTLPPSREEMTKNQVSLSCAVKGFYPSDIAVEWESNGQPENNYKTTPPVLDSDGSFFLVSKLTVDKSR |
| | WQQGNVFSCSVMHEALHNHYTQKSLSLSPG |
| 387 | AIG-1scDb-5 Chain1: |
| | EVQLVESGGGLVKPGGSLKLSCAASGYTFTSYVMHWVRQAPGKGLEWIGYINPYNDGTKYNEKFQGRVTISSDKSISTAYMELS |
| | SLRSEDTAMYYCARGTYYYGTRVFDYWGQGTLVTVSSASTKGPSVFPLAPSSKSTSGGTAALGCLVKDYFPEPVTVSWNSGALT |
| | SGVHTFPAVLQSSGLYSLSSVVTVPSSSLGTQTYICNVNHKPSNTKVDKKVEPKSCDKTHTCPPCPAPELLGGPSVFLFPPKPK |
| | DTLMISRTPEVTCVVVDVSHEDPEVKFNWYVDGVEVHNAKTKPREEQYNSTYRVVSVLTVLHQDWLNGKEYKCKVSNKALPAPI |
| | EKTISKAKGQPREPQVYTLPPSREEMTKNQVSLWCLVKGFYPSDIAVEWESNGQPENNYKTTPPVLDSDGSFFLYSKLTVDKSR |
| | WQQGNVFSCSVMHEALHNHYTQKSLSLSPGGGGGSGGGGSDIQMTQTTSSLSASLGDRVTISCRASQDISNYLNWYQQKPDGTV |
| | KLLIYYTSRLHSGVPSRFSGSGSGTDYSLTINNLEQEDIATYFCQQGNTRPWTFGGGTKLEIKGGSGGSQVQLQQSGPELVKPG |
| | ASVKMSCKASGYTFTDYVINWGKQRSGQGLEWIGEIYPGSGTNYYNEKFKAKATLTADKSSNIAYMQLSSLTSEDSAVYFCARR |
| | GRYGLYAMDYWGQGTSVTVSSGGSGGSGGSGGSGGSGGSDIQMTQTTSSLSASLGDRVTISCRASQDISNYLNWYQQKPDGTVK |
| | LLIYYTSRLHSGVPSRFSGSGSGTDYSLTINNLEQEDIATYFCQQGNTRPWTFGGGTKLEIKGGSGGSQVQLQQSGPELVKPGA |
| | SVKMSCKASGYTFTDYVINWGKQRSGQGLEWIGEIYPGSGTNYYNEKFKAKATLTADKSSNIAYMQLSSLTSEDSAVYFCARRG |
| | RYGLYAMDYWGQGTSVTVSS |
| 388 | AIG-1scDb-5 Chain2: |
| | DIVMTQSPATLSLSPGERATLSCRSSKSLQNVNGNTYLYWFQQKPGQSPQLLIYRMSNLNSGVPDRFSGSGSGTEFTLTISSLE |
| | PEDFAVYYCMQHLEYPITFGAGTKLEIKRTVAAPSVFIFPPSDEQLKSGTASVVCLLNNFYPREAKVQWKVDNALQSGNSQESV |
| | TEQDSKDSTYSLSSTLTLSKADYEKHKVYACEVTHQGLSSPVTKSFNRGEC |
| 389 | AIG-1scDb-5 Chain3: |
| | EVQLVESGGGLVKPGGSLKLSCAASGYTFTSYVMHWVRQAPGKGLEWIGYINPYNDGTKYNEKFQGRVTISSDKSISTAYMELS |
| | SLRSEDTAMYYCARGTYYYGTRVFDYWGQGTLVTVSSASTKGPSVFPLAPSSKSTSGGTAALGCLVKDYFPEPVTVSWNSGALT |
| | SGVHTFPAVLQSSGLYSLSSVVTVPSSSLGTQTYICNVNHKPSNTKVDKKVEPKSCDKTHTCPPCPAPELLGGPSVFLFPPKPK |
| | DTLMISRTPEVTCVVVDVSHEDPEVKFNWYVDGVEVHNAKTKPREEQYNSTYRVVSVLTVLHQDWLNGKEYKCKVSNKALPAPI |
| | EKTISKAKGQPREPQVYTLPPSREEMTKNQVSLSCAVKGFYPSDIAVEWESNGQPENNYKTTPPVLDSDGSFFLVSKLTVDKSR |
| | WQQGNVFSCSVMHEALHNHYTQKSLSLSPG |
| 390 | AIG-1scDb-6 Chain1: |
| | EVQLVESGGGLVKPGGSLKLSCAASGYTFTSYVMHWVRQAPGKGLEWIGYINPYNDGTKYNEKFQGRVTISSDKSISTAYMELS |
| | SLRSEDTAMYYCARGTYYYGTRVFDYWGQGTLVTVSSASTKGPSVFPLAPSSKSTSGGTAALGCLVKDYFPEPVTVSWNSGALT |
| | SGVHTFPAVLQSSGLYSLSSVVTVPSSSLGTQTYICNVNHKPSNTKVDKKVEPKSCDKTHTCPPCPAPELLGGPSVFLFPPKPK |
| | DTLMISRTPEVTCVVVDVSHEDPEVKFNWYVDGVEVHNAKTKPREEQYNSTYRVVSVLTVLHQDWLNGKEYKCKVSNKALPAPI |
| | EKTISKAKGQPREPQVYTLPPSREEMTKNQVSLWCLVKGFYPSDIAVEWESNGQPENNYKTTPPVLDSDGSFFLYSKLTVDKSR |
| | WQQGNVFSCSVMHEALHNHYTQKSLSLSPGGGGGSGGGGSDIVMTQSPATLSVTPGDRVSLSCRASQSISDYLHWYQQKSHESP |
| | RLLIKYASQSISGIPSRFSGSGSGSDFTLSINSVEPEDVGVYYCQNGHSFPLTFGAGTKLELKGGSGGSEVQLQQSGPELVKPG |
| | ASVKISCKTSGYTFTEYTMHWVKQSHGKSLEWIGGISPNIGGTSYNQKFKGKATLTVDKSSSTAYMELRSLTSEDSAVYYCARR |
| | GGSFDYWGQGTTLTVSSGGSGGSGGSGGSGGSGGSDIVMTQSPATLSVTPGDRVSLSCRASQSISDYLHWYQQKSHESPRLLIK |
| | YASQSISGIPSRFSGSGSGSDFTLSINSVEPEDVGVYYCQNGHSFPLTFGAGTKLELKGGSGGSEVQLQQSGPELVKPGASVKI |
| | SCKTSGYTFTEYTMHWVKQSHGKSLEWIGGISPNIGGTSYNQKFKGKATLTVDKSSSTAYMELRSLTSEDSAVYYCARRGGSFD |
| | YWGQGTTLTVSS |
| 391 | AIG-1scDb-6 Chain2: |
| | DIVMTQSPATLSLSPGERATLSCRSSKSLQNVNGNTYLYWFQQKPGQSPQLLIYRMSNLNSGVPDRFSGSGSGTEFTLTISSLE |
| | PEDFAVYYCMQHLEYPITFGAGTKLEIKRTVAAPSVFIFPPSDEQLKSGTASVVCLLNNFYPREAKVQWKVDNALQSGNSQESV |
| | TEQDSKDSTYSLSSTLTLSKADYEKHKVYACEVTHQGLSSPVTKSFNRGEC |
| 392 | AIG-1scDb-6 Chain3: |
| | EVQLVESGGGLVKPGGSLKLSCAASGYTFTSYVMHWVRQAPGKGLEWIGYINPYNDGTKYNEKFQGRVTISSDKSISTAYMELS |
| | SLRSEDTAMYYCARGTYYYGTRVFDYWGQGTLVTVSSASTKGPSVFPLAPSSKSTSGGTAALGCLVKDYFPEPVTVSWNSGALT |
| | SGVHTFPAVLQSSGLYSLSSVVTVPSSSLGTQTYICNVNHKPSNTKVDKKVEPKSCDKTHTCPPCPAPELLGGPSVFLFPPKPK |
| | DTLMISRTPEVTCVVVDVSHEDPEVKFNWYVDGVEVHNAKTKPREEQYNSTYRVVSVLTVLHQDWLNGKEYKCKVSNKALPAPI |
| | EKTISKAKGQPREPQVYTLPPSREEMTKNQVSLSCAVKGFYPSDIAVEWESNGQPENNYKTTPPVLDSDGSFFLVSKLTVDKSR |
| | WQQGNVFSCSVMHEALHNHYTQKSLSLSPG |
| 393 | 1Fab-AFc-1Fab-1 Chain1: |
| | DIVMTQSPATLSLSPGERATLSCRSSKSLQNVNGNTYLYWFQQKPGQSPQLLIYRMSNLNSGVPDRFSGSGSGTEFTLTISSLE |
| | PEDFAVYYCMQHLEYPITFGAGTKLEIKRTVAAPSVFIFPPSDEQLKSGTASVVCLLNNFYPREAKVQWKVDNALQSGNSQESV |
| | TEQDSKDSTYSLSSTLTLSKADYEKHKVYACEVTHQGLSSPVTKSFNRGECDKTHTCPPCPAPELLGGPSVFLFPPKPKDTLMI |
| | SRTPEVTCVVVDVSHEDPEVKFNWYVDGVEVHNAKTKPREEQYNSTYRVVSVLTVLHQDWLNGKEYKCKVSNKALPAPIEKTIS |
| | KAKGQPREPQVYTLPPSREEMTKNQVSLWCLVKGFYPSDIAVEWESNGQPENNYKTTPPVLDSDGSFFLYSKLTVDKSRWQQGN |
| | VFSCSVMHEALHNHYTQKSLSLSPGK |
| 394 | 1Fab-AFc-1Fab-1 Chain2: |
| | EVQLVESGGGLVKPGGSLKLSCAASGYTFTSYVMHWVRQAPGKGLEWIGYINPYNDGTKYNEKFQGRVTISSDKSISTAYMELS |
| | SLRSEDTAMYYCARGTYYYGTRVFDYWGQGTLVTVSSASTKGPSVFPLAPSSKSTSGGTAALGCLVKDYFPEPVTVSWNSGALT |
| | SGVHTFPAVLQSSGLYSLSSVVTVPSSSLGTQTYICNVNHKPSNTKVDKKVEPKSCDKTHTCPPCPAPELLGGPSVFLFPPKPK |
| | DTLMISRTPEVTCVVVDVSHEDPEVKFNWYVDGVEVHNAKTKPREEQYNSTYRVVSVLTVLHQDWLNGKEYKCKVSNKALPAPI |
| | EKTISKAKGQPREPQVYTLPPSREEMTKNQVSLSCAVKGFYPSDIAVEWESNGQPENNYKTTPPVLDSDGSFFLVSKLTVDKSR |
| | WQQGNVFSCSVMHEALHNHYTQKSLSLSPGSTGSQVQLQQSGPELVKPGASVKMSCKASGYTFTDYVINWGKQRSGQGLEWIGE |
| | IYPGSGTNYYNEKFKAKATLTADKSSNIAYMQLSSLTSEDSAVYFCARRGRYGLYAMDYWGQGTSVTVSSRTVAAPSVFIFPPS |
| | DEQLKSGTASVVCLLNNFYPREAKVQWKVDNALQSGNSQESVTEQDSKDSTYSLSSTLTLSKADYEKHKVYACEVTHQGLSSPV |
| | TKSFNRGEC |
| 395 | 1Fab-AFc-1Fab-1 Chain3: |
| | DIQMTQTTSSLSASLGDRVTISCRASQDISNYLNWYQQKPDGTVKLLIYYTSRLHSGVPSRFSGSGSGTDYSLTINNLEQEDIA |
| | TYFCQQGNTRPWTFGGGTKLEIKASTKGPSVFPLAPSSKSTSGGTAALGCLVKDYFPEPVTVSWNSGALTSGVHTFPAVLQSSG |
| | LYSLSSVVTVPSSSLGTQTYICNVNHKPSNTKVDKKVEPKSCDKTH |
| 396 | 1Fab-AFc-1Fab-2 Chain1: |
| | DIVMTQSPATLSLSPGERATLSCRSSKSLQNVNGNTYLYWFQQKPGQSPQLLIYRMSNLNSGVPDRFSGSGSGTEFTLTISSLE |
| | PEDFAVYYCMQHLEYPITFGAGTKLEIKRTVAAPSVFIFPPSDEQLKSGTASVVCLLNNFYPREAKVQWKVDNALQSGNSQESV |
| | TEQDSKDSTYSLSSTLTLSKADYEKHKVYACEVTHQGLSSPVTKSFNRGECDKTHTCPPCPAPELLGGPSVFLFPPKPKDTLMI |
| | SRTPEVTCVVVDVSHEDPEVKFNWYVDGVEVHNAKTKPREEQYNSTYRVVSVLTVLHQDWLNGKEYKCKVSNKALPAPIEKTIS |
| | KAKGQPREPQVYTLPPSREEMTKNQVSLWCLVKGFYPSDIAVEWESNGQPENNYKTTPPVLDSDGSFFLYSKLTVDKSRWQQGN |
| | VFSCSVMHEALHNHYTQKSLSLSPGK |
| 397 | 1Fab-AFc-1Fab-2 Chain2: |
| | EVQLVESGGGLVKPGGSLKLSCAASGYTFTSYVMHWVRQAPGKGLEWIGYINPYNDGTKYNEKFQGRVTISSDKSISTAYMELS |
| | SLRSEDTAMYYCARGTYYYGTRVFDYWGQGTLVTVSSASTKGPSVFPLAPSSKSTSGGTAALGCLVKDYFPEPVTVSWNSGALT |
| | SGVHTFPAVLQSSGLYSLSSVVTVPSSSLGTQTYICNVNHKPSNTKVDKKVEPKSCDKTHTCPPCPAPELLGGPSVFLFPPKPK |
| | DTLMISRTPEVTCVVVDVSHEDPEVKFNWYVDGVEVHNAKTKPREEQYNSTYRVVSVLTVLHQDWLNGKEYKCKVSNKALPAPI |
| | EKTISKAKGQPREPQVYTLPPSREEMTKNQVSLSCAVKGFYPSDIAVEWESNGQPENNYKTTPPVLDSDGSFFLVSKLTVDKSR |
| | WQQGNVFSCSVMHEALHNHYTQKSLSLSPGSTGSEVQLQQSGPELVKPGASVKISCKTSGYTFTEYTMHWVKQSHGKSLEWIGG |
| | ISPNIGGTSYNQKFKGKATLTVDKSSSTAYMELRSLTSEDSAVYYCARRGGSFDYWGQGTTLTVSSRTVAAPSVFIFPPSDEQL |
| | KSGTASVVCLLNNFYPREAKVQWKVDNALQSGNSQESVTEQDSKDSTYSLSSTLTLSKADYEKHKVYACEVTHQGLSSPVTKSF |
| | NRGEC |
| 398 | 1Fab-AFc-1Fab-2 Chain3: |
| | DIVMTQSPATLSVTPGDRVSLSCRASQSISDYLHWYQQKSHESPRLLIKYASQSISGIPSRFSGSGSGSDFTLSINSVEPEDVG |
| | VYYCQNGHSFPLTFGAGTKLELKASTKGPSVFPLAPSSKSTSGGTAALGCLVKDYFPEPVTVSWNSGALTSGVHTFPAVLQSSG |
| | LYSLSSVVTVPSSSLGTQTYICNVNHKPSNTKVDKKVEPKSCDKTH |
| 399 | 1Fab-AFc-1Fab-3 Chain1: |
| | QPVLTQPPSVSVAPGKTARITCGGNNIGSKSVHWYQQKPGQAPVLVIYYDSDRPSGIPERFSGSNSGNTATLTISRVEAGDEAD |
| | YYCQVWDTSSDHVLFGGGTKLTVLGQPKAAPSVTLFPPSSEELQANKATLVCLISDFYPGAVTVAWKADSSPVKAGVETTTPSK |
| | QSNNKYAASSYLSLTPEQWKSHRSYSCQVTHEGSTVEKTVAPTECSDKTHTCPPCPAPELLGGPSVFLFPPKPKDTLMISRTPE |
| | VTCVVVDVSHEDPEVKFNWYVDGVEVHNAKTKPREEQYNSTYRVVSVLTVLHQDWLNGKEYKCKVSNKALPAPIEKTISKAKGQ |
| | PREPQVYTLPPSREEMTKNQVSLWCLVKGFYPSDIAVEWESNGQPENNYKTTPPVLDSDGSFFLYSKLTVDKSRWQQGNVFSCS |
| | VMHEALHNHYTQKSLSLSPGK |
| 400 | 1Fab-AFc-1Fab-3 Chain2: |
| | EVQLQESGPGLVKPSETLSLTCTVSGGSVSSGSYYWSWIRQPPGKGLEWIGYIYYSGSTNYNPSLKSRVTISVDTSKNQFSLKL |
| | SSVTAADTAVYYCARNPISIPAFDIWGQGTMVTVSSASTKGPSVFPLAPSSKSTSGGTAALGCLVKDYFPEPVTVSWNSGALTS |
| | GVHTFPAVLQSSGLYSLSSVVTVPSSSLGTQTYICNVNHKPSNTKVDKKVEPKSCDKTHTCPPCPAPELLGGPSVFLFPPKPKD |
| | TLMISRTPEVTCVVVDVSHEDPEVKFNWYVDGVEVHNAKTKPREEQYNSTYRVVSVLTVLHQDWLNGKEYKCKVSNKALPAPIE |
| | KTISKAKGQPREPQVYTLPPSREEMTKNQVSLSCAVKGFYPSDIAVEWESNGQPENNYKTTPPVLDSDGSFFLVSKLTVDKSRW |
| | QQGNVFSCSVMHEALHNHYTQKSLSLSPGSTGSQVQLQQSGPELVKPGASVKMSCKASGYTFTDYVINWGKQRSGQGLEWIGEI |
| | YPGSGTNYYNEKFKAKATLTADKSSNIAYMQLSSLTSEDSAVYFCARRGRYGLYAMDYWGQGTSVTVSSRTVAAPSVFIFPPSD |
| | EQLKSGTASVVCLLNNFYPREAKVQWKVDNALQSGNSQESVTEQDSKDSTYSLSSTLTLSKADYEKHKVYACEVTHQGLSSPVT |
| | KSFNRGEC |
| 401 | 1Fab-AFc-1Fab-3 Chain3: |
| | DIQMTQTTSSLSASLGDRVTISCRASQDISNYLNWYQQKPDGTVKLLIYYTSRLHSGVPSRFSGSGSGTDYSLTINNLEQEDIA |
| | TYFCQQGNTRPWTFGGGTKLEIKASTKGPSVFPLAPSSKSTSGGTAALGCLVKDYFPEPVTVSWNSGALTSGVHTFPAVLQSSG |
| | LYSLSSVVTVPSSSLGTQTYICNVNHKPSNTKVDKKVEPKSCDKTH |
| 402 | 1Fab-AFc-1Fab-4 Chain1: |
| | QPVLTQPPSVSVAPGKTARITCGGNNIGSKSVHWYQQKPGQAPVLVIYYDSDRPSGIPERFSGSNSGNTATLTISRVEAGDEAD |
| | YYCQVWDTSSDHVLFGGGTKLTVLGQPKAAPSVTLFPPSSEELQANKATLVCLISDFYPGAVTVAWKADSSPVKAGVETTTPSK |
| | QSNNKYAASSYLSLTPEQWKSHRSYSCQVTHEGSTVEKTVAPTECSDKTHTCPPCPAPELLGGPSVFLFPPKPKDTLMISRTPE |
| | VTCVVVDVSHEDPEVKFNWYVDGVEVHNAKTKPREEQYNSTYRVVSVLTVLHQDWLNGKEYKCKVSNKALPAPIEKTISKAKGQ |
| | PREPQVYTLPPSREEMTKNQVSLWCLVKGFYPSDIAVEWESNGQPENNYKTTPPVLDSDGSFFLYSKLTVDKSRWQQGNVFSCS |
| | VMHEALHNHYTQKSLSLSPGK |
| 403 | 1Fab-AFc-1Fab-4 Chain2: |
| | EVQLQESGPGLVKPSETLSLTCTVSGGSVSSGSYYWSWIRQPPGKGLEWIGYIYYSGSTNYNPSLKSRVTISVDTSKNQFSLKL |
| | SSVTAADTAVYYCARNPISIPAFDIWGQGTMVTVSSASTKGPSVFPLAPSSKSTSGGTAALGCLVKDYFPEPVTVSWNSGALTS |
| | GVHTFPAVLQSSGLYSLSSVVTVPSSSLGTQTYICNVNHKPSNTKVDKKVEPKSCDKTHTCPPCPAPELLGGPSVFLFPPKPKD |
| | TLMISRTPEVTCVVVDVSHEDPEVKFNWYVDGVEVHNAKTKPREEQYNSTYRVVSVLTVLHQDWLNGKEYKCKVSNKALPAPIE |
| | KTISKAKGQPREPQVYTLPPSREEMTKNQVSLSCAVKGFYPSDIAVEWESNGQPENNYKTTPPVLDSDGSFFLVSKLTVDKSRW |
| | QQGNVFSCSVMHEALHNHYTQKSLSLSPGSTGSEVQLQQSGPELVKPGASVKISCKTSGYTFTEYTMHWVKQSHGKSLEWIGGI |
| | SPNIGGTSYNQKFKGKATLTVDKSSSTAYMELRSLTSEDSAVYYCARRGGSFDYWGQGTTLTVSSRTVAAPSVFIFPPSDEQLK |
| | SGTASVVCLLNNFYPREAKVQWKVDNALQSGNSQESVTEQDSKDSTYSLSSTLTLSKADYEKHKVYACEVTHQGLSSPVTKSFN |
| | RGEC |
| 404 | 1Fab-AFc-1Fab-4 Chain3: |
| | DIVMTQSPATLSVTPGDRVSLSCRASQSISDYLHWYQQKSHESPRLLIKYASQSISGIPSRFSGSGSGSDFTLSINSVEPEDVG |
| | VYYCQNGHSFPLTFGAGTKLELKASTKGPSVFPLAPSSKSTSGGTAALGCLVKDYFPEPVTVSWNSGALTSGVHTFPAVLQSSG |
| | LYSLSSVVTVPSSSLGTQTYICNVNHKPSNTKVDKKVEPKSCDKTH |
| 405 | 1Fab-AFc-1Fab-5 Chain1: |
| | DIVMTQSPATLSLSPGERATLSCRSSKSLQNVNGNTYLYWFQQKPGQSPQLLIYRMSNLNSGVPDRFSGSGSGTEFTLTISSLE |
| | PEDFAVYYCMQHLEYPITFGAGTKLEIKRTVAAPSVFIFPPSDEQLKSGTASVVCLLNNFYPREAKVQWKVDNALQSGNSQESV |
| | TEQDSKDSTYSLSSTLTLSKADYEKHKVYACEVTHQGLSSPVTKSFNRGECDKTHTCPPCPAPELLGGPDVFLFPPKPKDTLMI |
| | SRTPEVTCVVVDVSHEDPEVKFNWYVDGVEVHNAKTKPREEQYNSTYRVVSVLTVLHQDWLNGKEYKCKVSNKALPAPEEKTIS |
| | KAKGQPREPQVYTLPPSREEMTKNQVSLWCLVKGFYPSDIAVEWESNGQPENNYKTTPPVLDSDGSFFLYSKLTVDKSRWQQGN |
| | VFSCSVMHEALHNHYTQKSLSLSPGK |
| 406 | 1Fab-AFc-1Fab-5 Chain2: |
| | EVQLVESGGGLVKPGGSLKLSCAASGYTFTSYVMHWVRQAPGKGLEWIGYINPYNDGTKYNEKFQGRVTISSDKSISTAYMELS |
| | SLRSEDTAMYYCARGTYYYGTRVFDYWGQGTLVTVSSASTKGPSVFPLAPSSKSTSGGTAALGCLVKDYFPEPVTVSWNSGALT |
| | SGVHTFPAVLQSSGLYSLSSVVTVPSSSLGTQTYICNVNHKPSNTKVDKKVEPKSCDKTHTCPPCPAPELLGGPDVFLFPPKPK |
| | DTLMISRTPEVTCVVVDVSHEDPEVKFNWYVDGVEVHNAKTKPREEQYNSTYRVVSVLTVLHQDWLNGKEYKCKVSNKALPAPE |
| | EKTISKAKGQPREPQVYTLPPSREEMTKNQVSLSCAVKGFYPSDIAVEWESNGQPENNYKTTPPVLDSDGSFFLVSKLTVDKSR |
| | WQQGNVFSCSVMHEALHNHYTQKSLSLSPGSTGSQVQLQQSGPELVKPGASVKMSCKASGYTFTDYVINWGKQRSGQGLEWIGE |
| | IYPGSGTNYYNEKFKAKATLTADKSSNIAYMQLSSLTSEDSAVYFCARRGRYGLYAMDYWGQGTSVTVSSRTVAAPSVFIFPPS |
| | DEQLKSGTASVVCLLNNFYPREAKVQWKVDNALQSGNSQESVTEQDSKDSTYSLSSTLTLSKADYEKHKVYACEVTHQGLSSPV |
| | TKSFNRGEC |
| 407 | 1Fab-AFc-1Fab-5 Chain3: |
| | DIQMTQTTSSLSASLGDRVTISCRASQDISNYLNWYQQKPDGTVKLLIYYTSRLHSGVPSRFSGSGSGTDYSLTINNLEQEDIA |
| | TYFCQQGNTRPWTFGGGTKLEIKASTKGPSVFPLAPSSKSTSGGTAALGCLVKDYFPEPVTVSWNSGALTSGVHTFPAVLQSSG |
| | LYSLSSVVTVPSSSLGTQTYICNVNHKPSNTKVDKKVEPKSCDKTH |
| 408 | 1Fab-AFc-1Fab-6 Chain1: |
| | DIVMTQSPATLSLSPGERATLSCRSSKSLQNVNGNTYLYWFQQKPGQSPQLLIYRMSNLNSGVPDRFSGSGSGTEFTLTISSLE |
| | PEDFAVYYCMQHLEYPITFGAGTKLEIKRTVAAPSVFIFPPSDEQLKSGTASVVCLLNNFYPREAKVQWKVDNALQSGNSQESV |
| | TEQDSKDSTYSLSSTLTLSKADYEKHKVYACEVTHQGLSSPVTKSFNRGECDKTHTCPPCPAPELLGGPDVFLFPPKPKDTLMI |
| | SRTPEVTCVVVDVSHEDPEVKFNWYVDGVEVHNAKTKPREEQYNSTYRVVSVLTVLHQDWLNGKEYKCKVSNKALPAPEEKTIS |
| | KAKGQPREPQVYTLPPSREEMTKNQVSLWCLVKGFYPSDIAVEWESNGQPENNYKTTPPVLDSDGSFFLYSKLTVDKSRWQQGN |
| | VFSCSVMHEALHNHYTQKSLSLSPGK |
| 409 | 1Fab-AFc-1Fab-6 Chain2: |
| | EVQLVESGGGLVKPGGSLKLSCAASGYTFTSYVMHWVRQAPGKGLEWIGYINPYNDGTKYNEKFQGRVTISSDKSISTAYMELS |
| | SLRSEDTAMYYCARGTYYYGTRVFDYWGQGTLVTVSSASTKGPSVFPLAPSSKSTSGGTAALGCLVKDYFPEPVTVSWNSGALT |
| | SGVHTFPAVLQSSGLYSLSSVVTVPSSSLGTQTYICNVNHKPSNTKVDKKVEPKSCDKTHTCPPCPAPELLGGPDVFLFPPKPK |
| | DTLMISRTPEVTCVVVDVSHEDPEVKFNWYVDGVEVHNAKTKPREEQYNSTYRVVSVLTVLHQDWLNGKEYKCKVSNKALPAPE |
| | EKTISKAKGQPREPQVYTLPPSREEMTKNQVSLSCAVKGFYPSDIAVEWESNGQPENNYKTTPPVLDSDGSFFLVSKLTVDKSR |
| | WQQGNVFSCSVMHEALHNHYTQKSLSLSPGSTGSEVQLQQSGPELVKPGASVKISCKTSGYTFTEYTMHWVKQSHGKSLEWIGG |
| | ISPNIGGTSYNQKFKGKATLTVDKSSSTAYMELRSLTSEDSAVYYCARRGGSFDYWGQGTTLTVSSRTVAAPSVFIFPPSDEQL |
| | KSGTASVVCLLNNFYPREAKVQWKVDNALQSGNSQESVTEQDSKDSTYSLSSTLTLSKADYEKHKVYACEVTHQGLSSPVTKSF |
| | NRGEC |
| 410 | 1Fab-AFc-1Fab-6 Chain3: |
| | DIVMTQSPATLSVTPGDRVSLSCRASQSISDYLHWYQQKSHESPRLLIKYASQSISGIPSRFSGSGSGSDFTLSINSVEPEDVG |
| | VYYCQNGHSFPLTFGAGTKLELKASTKGPSVFPLAPSSKSTSGGTAALGCLVKDYFPEPVTVSWNSGALTSGVHTFPAVLQSSG |
| | LYSLSSVVTVPSSSLGTQTYICNVNHKPSNTKVDKKVEPKSCDKTH |
| 411 | 1Fab-AFc-1Fab-7 Chain1: |
| | QPVLTQPPSVSVAPGKTARITCGGNNIGSKSVHWYQQKPGQAPVLVIYYDSDRPSGIPERFSGSNSGNTATLTISRVEAGDEAD |
| | YYCQVWDTSSDHVLFGGGTKLTVLGQPKAAPSVTLFPPSSEELQANKATLVCLISDFYPGAVTVAWKADSSPVKAGVETTTPSK |
| | QSNNKYAASSYLSLTPEQWKSHRSYSCQVTHEGSTVEKTVAPTECSDKTHTCPPCPAPELLGGPDVFLFPPKPKDTLMISRTPE |
| | VTCVVVDVSHEDPEVKFNWYVDGVEVHNAKTKPREEQYNSTYRVVSVLTVLHQDWLNGKEYKCKVSNKALPAPEEKTISKAKGQ |
| | PREPQVYTLPPSREEMTKNQVSLWCLVKGFYPSDIAVEWESNGQPENNYKTTPPVLDSDGSFFLYSKLTVDKSRWQQGNVFSCS |
| | VMHEALHNHYTQKSLSLSPGK |
| 412 | 1Fab-AFc-1Fab-7 Chain2: |
| | EVQLQESGPGLVKPSETLSLTCTVSGGSVSSGSYYWSWIRQPPGKGLEWIGYIYYSGSTNYNPSLKSRVTISVDTSKNQFSLKL |
| | SSVTAADTAVYYCARNPISIPAFDIWGQGTMVTVSSASTKGPSVFPLAPSSKSTSGGTAALGCLVKDYFPEPVTVSWNSGALTS |
| | GVHTFPAVLQSSGLYSLSSVVTVPSSSLGTQTYICNVNHKPSNTKVDKKVEPKSCDKTHTCPPCPAPELLGGPDVFLFPPKPKD |
| | TLMISRTPEVTCVVVDVSHEDPEVKFNWYVDGVEVHNAKTKPREEQYNSTYRVVSVLTVLHQDWLNGKEYKCKVSNKALPAPEE |
| | KTISKAKGQPREPQVYTLPPSREEMTKNQVSLSCAVKGFYPSDIAVEWESNGQPENNYKTTPPVLDSDGSFFLVSKLTVDKSRW |
| | QQGNVFSCSVMHEALHNHYTQKSLSLSPGSTGSQVQLQQSGPELVKPGASVKMSCKASGYTFTDYVINWGKQRSGQGLEWIGEI |
| | YPGSGTNYYNEKFKAKATLTADKSSNIAYMQLSSLTSEDSAVYFCARRGRYGLYAMDYWGQGTSVTVSSRTVAAPSVFIFPPSD |
| | EQLKSGTASVVCLLNNFYPREAKVQWKVDNALQSGNSQESVTEQDSKDSTYSLSSTLTLSKADYEKHKVYACEVTHQGLSSPVT |
| | KSFNRGEC |
| 413 | 1Fab-AFc-1Fab-7 Chain3: |
| | DIQMTQTTSSLSASLGDRVTISCRASQDISNYLNWYQQKPDGTVKLLIYYTSRLHSGVPSRFSGSGSGTDYSLTINNLEQEDIA |
| | TYFCQQGNTRPWTFGGGTKLEIKASTKGPSVFPLAPSSKSTSGGTAALGCLVKDYFPEPVTVSWNSGALTSGVHTFPAVLQSSG |
| | LYSLSSVVTVPSSSLGTQTYICNVNHKPSNTKVDKKVEPKSCDKTH |
| 414 | 1Fab-AFc-1Fab-8 Chain1: |
| | QPVLTQPPSVSVAPGKTARITCGGNNIGSKSVHWYQQKPGQAPVLVIYYDSDRPSGIPERFSGSNSGNTATLTISRVEAGDEAD |
| | YYCQVWDTSSDHVLFGGGTKLTVLGQPKAAPSVTLFPPSSEELQANKATLVCLISDFYPGAVTVAWKADSSPVKAGVETTTPSK |
| | QSNNKYAASSYLSLTPEQWKSHRSYSCQVTHEGSTVEKTVAPTECSDKTHTCPPCPAPELLGGPDVFLFPPKPKDTLMISRTPE |
| | VTCVVVDVSHEDPEVKFNWYVDGVEVHNAKTKPREEQYNSTYRVVSVLTVLHQDWLNGKEYKCKVSNKALPAPEEKTISKAKGQ |
| | PREPQVYTLPPSREEMTKNQVSLWCLVKGFYPSDIAVEWESNGQPENNYKTTPPVLDSDGSFFLYSKLTVDKSRWQQGNVFSCS |
| | VMHEALHNHYTQKSLSLSPGK |
| 415 | 1Fab-AFc-1Fab-8 Chain2: |
| | EVQLQESGPGLVKPSETLSLTCTVSGGSVSSGSYYWSWIRQPPGKGLEWIGYIYYSGSTNYNPSLKSRVTISVDTSKNQFSLKL |
| | SSVTAADTAVYYCARNPISIPAFDIWGQGTMVTVSSASTKGPSVFPLAPSSKSTSGGTAALGCLVKDYFPEPVTVSWNSGALTS |
| | GVHTFPAVLQSSGLYSLSSVVTVPSSSLGTQTYICNVNHKPSNTKVDKKVEPKSCDKTHTCPPCPAPELLGGPDVFLFPPKPKD |
| | TLMISRTPEVTCVVVDVSHEDPEVKFNWYVDGVEVHNAKTKPREEQYNSTYRVVSVLTVLHQDWLNGKEYKCKVSNKALPAPEE |
| | KTISKAKGQPREPQVYTLPPSREEMTKNQVSLSCAVKGFYPSDIAVEWESNGQPENNYKTTPPVLDSDGSFFLVSKLTVDKSRW |
| | QQGNVFSCSVMHEALHNHYTQKSLSLSPGSTGSEVQLQQSGPELVKPGASVKISCKTSGYTFTEYTMHWVKQSHGKSLEWIGGI |
| | SPNIGGTSYNQKFKGKATLTVDKSSSTAYMELRSLTSEDSAVYYCARRGGSFDYWGQGTTLTVSSRTVAAPSVFIFPPSDEQLK |
| | SGTASVVCLLNNFYPREAKVQWKVDNALQSGNSQESVTEQDSKDSTYSLSSTLTLSKADYEKHKVYACEVTHQGLSSPVTKSFN |
| | RGEC |
| 416 | 1Fab-AFc-1Fab-8 Chain3: |
| | DIVMTQSPATLSVTPGDRVSLSCRASQSISDYLHWYQQKSHESPRLLIKYASQSISGIPSRFSGSGSGSDFTLSINSVEPEDVG |
| | VYYCQNGHSFPLTFGAGTKLELKASTKGPSVFPLAPSSKSTSGGTAALGCLVKDYFPEPVTVSWNSGALTSGVHTFPAVLQSSG |
| | LYSLSSVVTVPSSSLGTQTYICNVNHKPSNTKVDKKVEPKSCDKTH |
| 417 | AIG-1scFv-5 Chain1: |
| | EVQLVESGGGLVKPGGSLKLSCAASGYTFTSYVMHWVRQAPGKGLEWIGYINPYNDGTKYNEKFQGRVTISSDKSISTAYMELS |
| | SLRSEDTAMYYCARGTYYYGTRVFDYWGQGTLVTVSSASTKGPSVFPLAPSSKSTSGGTAALGCLVKDYFPEPVTVSWNSGALT |
| | SGVHTFPAVLQSSGLYSLSSVVTVPSSSLGTQTYICNVNHKPSNTKVDKKVEPKSCDKTHTCPPCPAPELLGGPSVFLFPPKPK |
| | DTLMISRTPEVTCVVVDVSHEDPEVKFNWYVDGVEVHNAKTKPREEQYNSTYRVVSVLTVLHQDWLNGKEYKCKVSNKALPAPI |
| | EKTISKAKGQPREPQVYTLPPSREEMTKNQVSLWCLVKGFYPSDIAVEWESNGQPENNYKTTPPVLDSDGSFFLYSKLTVDKSR |
| | WQQGNVFSCSVMHEALHNHYTQKSLSLSPGGGGGSGGGGSGGGGSGGGGSGGGGSGGGGSQVQLVESGGGLVKPGGSLRLSCAA |
| | SGFTFSSYGMHWVRQAPGKGLEWVAFIRYDGSNKYYADSVKGRFTISRDNSKNTLYLQMNSLRAEDTAVYYCAKDRGLGDGTYF |
| | DYWGQGTTVTVSSGGSGGSGGSGGSGGSGGSQSALTQPASVSGSPGQSITISCSGSSSNIGNNAVNWYQQLPGKAPKLLIYYDD |
| | LLPSGVSDRFSGSKSGTSAFLAISGLQSEDEADYYCAAWDDSLNGPVFGGGTKLTVL |
| 418 | AIG-1scFv-5 Chain2: |
| | DIVMTQSPATLSLSPGERATLSCRSSKSLQNVNGNTYLYWFQQKPGQSPQLLIYRMSNLNSGVPDRFSGSGSGTEFTLTISSLE |
| | PEDFAVYYCMQHLEYPITFGAGTKLEIKRTVAAPSVFIFPPSDEQLKSGTASVVCLLNNFYPREAKVQWKVDNALQSGNSQESV |
| | TEQDSKDSTYSLSSTLTLSKADYEKHKVYACEVTHQGLSSPVTKSFNRGEC |
| 419 | AIG-1scFv-5 Chain3: |
| | EVQLVESGGGLVKPGGSLKLSCAASGYTFTSYVMHWVRQAPGKGLEWIGYINPYNDGTKYNEKFQGRVTISSDKSISTAYMELS |
| | SLRSEDTAMYYCARGTYYYGTRVFDYWGQGTLVTVSSASTKGPSVFPLAPSSKSTSGGTAALGCLVKDYFPEPVTVSWNSGALT |
| | SGVHTFPAVLQSSGLYSLSSVVTVPSSSLGTQTYICNVNHKPSNTKVDKKVEPKSCDKTHTCPPCPAPELLGGPSVFLFPPKPK |
| | DTLMISRTPEVTCVVVDVSHEDPEVKFNWYVDGVEVHNAKTKPREEQYNSTYRVVSVLTVLHQDWLNGKEYKCKVSNKALPAPI |
| | EKTISKAKGQPREPQVYTLPPSREEMTKNQVSLSCAVKGFYPSDIAVEWESNGQPENNYKTTPPVLDSDGSFFLVSKLTVDKSR |
| | WQQGNVFSCSVMHEALHNHYTQKSLSLSPG |
| 420 | AIG-1scFv-6 Chain1: |
| | EVQLVESGGGLVKPGGSLKLSCAASGYTFTSYVMHWVRQAPGKGLEWIGYINPYNDGTKYNEKFQGRVTISSDKSISTAYMELS |
| | SLRSEDTAMYYCARGTYYYGTRVFDYWGQGTLVTVSSASTKGPSVFPLAPSSKSTSGGTAALGCLVKDYFPEPVTVSWNSGALT |
| | SGVHTFPAVLQSSGLYSLSSVVTVPSSSLGTQTYICNVNHKPSNTKVDKKVEPKSCDKTHTCPPCPAPELLGGPSVFLFPPKPK |
| | DTLMISRTPEVTCVVVDVSHEDPEVKFNWYVDGVEVHNAKTKPREEQYNSTYRVVSVLTVLHQDWLNGKEYKCKVSNKALPAPI |
| | EKTISKAKGQPREPQVYTLPPSREEMTKNQVSLWCLVKGFYPSDIAVEWESNGQPENNYKTTPPVLDSDGSFFLYSKLTVDKSR |
| | WQQGNVFSCSVMHEALHNHYTQKSLSLSPGGGGGSGGGGSGGGGSGGGGSGGGGSGGGGSQVQLQQWGAGLLKPSETLSLTCAV |
| | YGGSFSGYYWSWIRQPPGKGLEWIGEIDHSGSTNYNPSLKSRVTISVDTSKNQFSLKLSSVTAADTAVYYCARARGPWSFDPWG |
| | QGTLVTVSSGGSGGSGGSGGSGGSGGSDIQMTQSPSTLSASVGDRVTITCRASQSISSWLAWYQQKPGKAPKLLIYKASSLESG |
| | VPSRFSGSGSGTEFTLTISSLQPDDFATYYCQQYNSYPTFGGGTKVEIK |
| 421 | AIG-1scFv-6 Chain2: |
| | DIVMTQSPATLSLSPGERATLSCRSSKSLQNVNGNTYLYWFQQKPGQSPQLLIYRMSNLNSGVPDRFSGSGSGTEFTLTISSLE |
| | PEDFAVYYCMQHLEYPITFGAGTKLEIKRTVAAPSVFIFPPSDEQLKSGTASVVCLLNNFYPREAKVQWKVDNALQSGNSQESV |
| | TEQDSKDSTYSLSSTLTLSKADYEKHKVYACEVTHQGLSSPVTKSFNRGEC |
| 422 | AIG-1scFv-6 Chain3: |
| | EVQLVESGGGLVKPGGSLKLSCAASGYTFTSYVMHWVRQAPGKGLEWIGYINPYNDGTKYNEKFQGRVTISSDKSISTAYMELS |
| | SLRSEDTAMYYCARGTYYYGTRVFDYWGQGTLVTVSSASTKGPSVFPLAPSSKSTSGGTAALGCLVKDYFPEPVTVSWNSGALT |
| | SGVHTFPAVLQSSGLYSLSSVVTVPSSSLGTQTYICNVNHKPSNTKVDKKVEPKSCDKTHTCPPCPAPELLGGPSVFLFPPKPK |
| | DTLMISRTPEVTCVVVDVSHEDPEVKFNWYVDGVEVHNAKTKPREEQYNSTYRVVSVLTVLHQDWLNGKEYKCKVSNKALPAPI |
| | EKTISKAKGQPREPQVYTLPPSREEMTKNQVSLSCAVKGFYPSDIAVEWESNGQPENNYKTTPPVLDSDGSFFLVSKLTVDKSR |
| | WQQGNVFSCSVMHEALHNHYTQKSLSLSPG |
| 423 | AIG-1scFv-7 Chain1: |
| | EVQLQESGPGLVKPSETLSLTCTVSGGSVSSGSYYWSWIRQPPGKGLEWIGYIYYSGSTNYNPSLKSRVTISVDTSKNQFSLKL |
| | SSVTAADTAVYYCARNPISIPAFDIWGQGTMVTVSSASTKGPSVFPLAPSSKSTSGGTAALGCLVKDYFPEPVTVSWNSGALTS |
| | GVHTFPAVLQSSGLYSLSSVVTVPSSSLGTQTYICNVNHKPSNTKVDKKVEPKSCDKTHTCPPCPAPELLGGPSVFLFPPKPKD |
| | TLMISRTPEVTCVVVDVSHEDPEVKFNWYVDGVEVHNAKTKPREEQYNSTYRVVSVLTVLHQDWLNGKEYKCKVSNKALPAPIE |
| | KTISKAKGQPREPQVYTLPPSREEMTKNQVSLWCLVKGFYPSDIAVEWESNGQPENNYKTTPPVLDSDGSFFLYSKLTVDKSRW |
| | QQGNVFSCSVMHEALHNHYTQKSLSLSPGGGGGSGGGGSGGGGSGGGGSGGGGSGGGGSQVQLVESGGGLVKPGGSLRLSCAAS |
| | GFTFSSYGMHWVRQAPGKGLEWVAFIRYDGSNKYYADSVKGRFTISRDNSKNTLYLQMNSLRAEDTAVYYCAKDRGLGDGTYFD |
| | YWGQGTTVTVSSGGSGGSGGSGGSGGSGGSQSALTQPASVSGSPGQSITISCSGSSSNIGNNAVNWYQQLPGKAPKLLIYYDDL |
| | LPSGVSDRFSGSKSGTSAFLAISGLQSEDEADYYCAAWDDSLNGPVFGGGTKLTVL |
| 424 | AIG-1scFv-7 Chain2: |
| | QPVLTQPPSVSVAPGKTARITCGGNNIGSKSVHWYQQKPGQAPVLVIYYDSDRPSGIPERFSGSNSGNTATLTISRVEAGDEAD |
| | YYCQVWDTSSDHVLFGGGTKLTVLGQPKAAPSVTLFPPSSEELQANKATLVCLISDFYPGAVTVAWKADSSPVKAGVETTTPSK |
| | QSNNKYAASSYLSLTPEQWKSHRSYSCQVTHEGSTVEKTVAPTECS |
| 425 | AIG-1scFv-7 Chain3: |
| | EVQLQESGPGLVKPSETLSLTCTVSGGSVSSGSYYWSWIRQPPGKGLEWIGYIYYSGSTNYNPSLKSRVTISVDTSKNQFSLKL |
| | SSVTAADTAVYYCARNPISIPAFDIWGQGTMVTVSSASTKGPSVFPLAPSSKSTSGGTAALGCLVKDYFPEPVTVSWNSGALTS |
| | GVHTFPAVLQSSGLYSLSSVVTVPSSSLGTQTYICNVNHKPSNTKVDKKVEPKSCDKTHTCPPCPAPELLGGPSVFLFPPKPKD |
| | TLMISRTPEVTCVVVDVSHEDPEVKFNWYVDGVEVHNAKTKPREEQYNSTYRVVSVLTVLHQDWLNGKEYKCKVSNKALPAPIE |
| | KTISKAKGQPREPQVYTLPPSREEMTKNQVSLSCAVKGFYPSDIAVEWESNGQPENNYKTTPPVLDSDGSFFLVSKLTVDKSRW |
| | QQGNVFSCSVMHEALHNHYTQKSLSLSPG |
| 426 | AIG-1scFv-8 Chain1: |
| | EVQLQESGPGLVKPSETLSLTCTVSGGSVSSGSYYWSWIRQPPGKGLEWIGYIYYSGSTNYNPSLKSRVTISVDTSKNQFSLKL |
| | SSVTAADTAVYYCARNPISIPAFDIWGQGTMVTVSSASTKGPSVFPLAPSSKSTSGGTAALGCLVKDYFPEPVTVSWNSGALTS |
| | GVHTFPAVLQSSGLYSLSSVVTVPSSSLGTQTYICNVNHKPSNTKVDKKVEPKSCDKTHTCPPCPAPELLGGPSVFLFPPKPKD |
| | TLMISRTPEVTCVVVDVSHEDPEVKFNWYVDGVEVHNAKTKPREEQYNSTYRVVSVLTVLHQDWLNGKEYKCKVSNKALPAPIE |
| | KTISKAKGQPREPQVYTLPPSREEMTKNQVSLWCLVKGFYPSDIAVEWESNGQPENNYKTTPPVLDSDGSFFLYSKLTVDKSRW |
| | QQGNVFSCSVMHEALHNHYTQKSLSLSPGGGGGSGGGGSGGGGSGGGGSGGGGSGGGGSQVQLQQWGAGLLKPSETLSLTCAVY |
| | GGSFSGYYWSWIRQPPGKGLEWIGEIDHSGSTNYNPSLKSRVTISVDTSKNQFSLKLSSVTAADTAVYYCARARGPWSFDPWGQ |
| | GTLVTVSSGGSGGSGGSGGSGGSGGSDIQMTQSPSTLSASVGDRVTITCRASQSISSWLAWYQQKPGKAPKLLIYKASSLESGV |
| | PSRFSGSGSGTEFTLTISSLQPDDFATYYCQQYNSYPTFGGGTKVEIK |
| 427 | AIG-1scFv-8 Chain2: |
| | QPVLTQPPSVSVAPGKTARITCGGNNIGSKSVHWYQQKPGQAPVLVIYYDSDRPSGIPERFSGSNSGNTATLTISRVEAGDEAD |
| | YYCQVWDTSSDHVLFGGGTKLTVLGQPKAAPSVTLFPPSSEELQANKATLVCLISDFYPGAVTVAWKADSSPVKAGVETTTPSK |
| | QSNNKYAASSYLSLTPEQWKSHRSYSCQVTHEGSTVEKTVAPTECS |
| 428 | AIG-1scFv-8 Chain3: |
| | EVQLQESGPGLVKPSETLSLTCTVSGGSVSSGSYYWSWIRQPPGKGLEWIGYIYYSGSTNYNPSLKSRVTISVDTSKNQFSLKL |
| | SSVTAADTAVYYCARNPISIPAFDIWGQGTMVTVSSASTKGPSVFPLAPSSKSTSGGTAALGCLVKDYFPEPVTVSWNSGALTS |
| | GVHTFPAVLQSSGLYSLSSVVTVPSSSLGTQTYICNVNHKPSNTKVDKKVEPKSCDKTHTCPPCPAPELLGGPSVFLFPPKPKD |
| | TLMISRTPEVTCVVVDVSHEDPEVKFNWYVDGVEVHNAKTKPREEQYNSTYRVVSVLTVLHQDWLNGKEYKCKVSNKALPAPIE |
| | KTISKAKGQPREPQVYTLPPSREEMTKNQVSLSCAVKGFYPSDIAVEWESNGQPENNYKTTPPVLDSDGSFFLVSKLTVDKSRW |
| | QQGNVFSCSVMHEALHNHYTQKSLSLSPG |
| 429 | IgAb_51 Chain1: |
| | EVQLLESGGGLVQPGGSLRLSCAVSGFTFNSFAMSWVRQAPGKGLEWVSAISGSGGGTYYADSVKGRFTISRDNSKNTLYLQMN |
| | SLRAEDTAVYFCAKDKILWFGEPVFDYWGQGTLVTVSSASTKGPSVFPLAPSSKSTSGGTAALGCLVKDYFPEPVTVSWNSGAL |
| | TSGVHTFPAVLQSSGLYSLSSVVTVPSSSLGTQTYICNVNHKPSNTKVDKRVEPKSCDKTHTCPPCPAPELLGGPSVFLFPPKP |
| | KDTLMISRTPEVTCVVVDVSHEDPEVKFNWYVDGVEVHNAKTKPREEQYNSTYRVVSVLTVLHQDWLNGKEYKCKVSNKALPAP |
| | IEKTISKAKGQPREPQVYTLPPSREEMTKNQVSLTCLVKGFYPSDIAVEWESNGQPENNYKTTPPVLDSDGSFFLYSKLTVDKS |
| | RWQQGNVFSCSVMHEALHNHYTQKSLSLSPGK |
| 430 | IgAb_51 Chain2: |
| | EIVLTQSPATLSLSPGERATLSCRASQSVSSYLAWYQQKPGQAPRLLIYDASNRATGIPARFSGSGSGTDFTLTISSLEPEDFA |
| | VYYCQQRSNWPPTFGQGTKVEIKRTVAAPSVFIFPPSDEQLKSGTASVVCLLNNFYPREAKVQWKVDNALQSGNSQESVTEQDS |
| | KDSTYSLSSTLTLSKADYEKHKVYACEVTHQGLSSPVTKSFNRGEC |
| 431 | AIG-2scFv-7 Chain1: |
| | EVQLVESGGGLVQPGGSLRLSCAASGFNIKDTYIHWVRQAPGKGLEWVARIYPTNGYTRYADSVKGRFTISADTSKNTAYLQMN |
| | SLRAEDTAVYYCSRWGGDGFYAMDYWGQGTLVTVSSASTKGPSVFPLAPSSKSTSGGTAALGCLVKDYFPEPVTVSWNSGALTS |
| | GVHTFPAVLQSSGLYSLSSVVTVPSSSLGTQTYICNVNHKPSNTKVDKKVEPKSCDKTHTCPPCPAPEFEGGPSVFLFPPKPKD |
| | TLMISRTPEVTCVVVAVSHEDPEVKFNWYVDGVEVHNAKTKPREEQYNSTYRVVSVLTVLHQDWLNGKEYKCKVSNKALPAPIE |
| | KTISKAKGQPREPQVYTLPPSREEMTKNQVSLWCLVKGFYPSDIAVEWESNGQPENNYKTTPPVLDSDGSFFLYSKLTVDKSRW |
| | QQGNVFSCSVMHEALHNHYTQKSLSLSPGGGGGSGGGGSGGGGSGGGGSGGGGSGGGGSQVQLVESGGGLVKPGGSLRLSCAAS |
| | GFTFSSYGMHWVRQAPGKGLEWVAFIRYDGSNKYYADSVKGRFTISRDNSKNTLYLQMNSLRAEDTAVYYCAKDRGLGDGTYFD |
| | YWGQGTTVTVSSGGSGGSGGSGGSGGSGGSQSALTQPASVSGSPGQSITISCSGSSSNIGNNAVNWYQQLPGKAPKLLIYYDDL |
| | LPSGVSDRFSGSKSGTSAFLAISGLQSEDEADYYCAAWDDSLNGPVFGGGTKLTVL |
| 432 | AIG-2scFv-7 Chain2: |
| | DIQMTQSPSSLSASVGDRVTITCRASQDVNTAVAWYQQKPGKAPKLLIYSASFLYSGVPSRFSGSRSGTDFTLTISSLQPEDFA |
| | TYYCQQHYTTPPTFGQGTKVEIKRTVAAPSVFIFPPSDEQLKSGTASVVCLLNNFYPREAKVQWKVDNALQSGNSQESVTEQDS |
| | KDSTYSLSSTLTLSKADYEKHKVYACEVTHQGLSSPVTKSFNRGEC |
| 433 | AIG-2scFv-7 Chain3: |
| | EVQLVESGGGLVQPGGSLRLSCAASGFNIKDTYIHWVRQAPGKGLEWVARIYPTNGYTRYADSVKGRFTISADTSKNTAYLQMN |
| | SLRAEDTAVYYCSRWGGDGFYAMDYWGQGTLVTVSSASTKGPSVFPLAPSSKSTSGGTAALGCLVKDYFPEPVTVSWNSGALTS |
| | GVHTFPAVLQSSGLYSLSSVVTVPSSSLGTQTYICNVNHKPSNTKVDKKVEPKSCDKTHTCPPCPAPEFEGGPSVFLFPPKPKD |
| | TLMISRTPEVTCVVVAVSHEDPEVKFNWYVDGVEVHNAKTKPREEQYNSTYRVVSVLTVLHQDWLNGKEYKCKVSNKALPAPIE |
| | KTISKAKGQPREPQVYTLPPSREEMTKNQVSLSCAVKGFYPSDIAVEWESNGQPENNYKTTPPVLDSDGSFFLVSKLTVDKSRW |
| | QQGNVFSCSVMHEALHNHYTQKSLSLSPGGGGGSGGGGSGGGGSGGGGSGGGGSGGGGSSYELTQPLSVSVALGQTARITCGGN |
| | NIGSKSVHWYQQKPGQAPVLVIYQDKKRPSGIPERFSGSNSGNTATLTISRAQAGDEADYYCQVWDDYIVLFGCGTKLTVLGGS |
| | GGSGGSGGSGGSGGSGGSEVQLVQSGAEVKKPGASVKVSCKASGYTFTNYYMQWVRQAPGQCLEWMGIINPSGGVTSYAQKFQG |
| | RVTMTRDTSTSTVYMELSSLRSEDTAVYYCARGSAYYYDFADYWGQGTLVTVSS |
| 434 | AIG-2scFv-8 Chain1: |
| | EVQLVESGGGLVQPGGSLRLSCAASGFNIKDTYIHWVRQAPGKGLEWVARIYPTNGYTRYADSVKGRFTISADTSKNTAYLQMN |
| | SLRAEDTAVYYCSRWGGDGFYAMDYWGQGTLVTVSSASTKGPSVFPLAPSSKSTSGGTAALGCLVKDYFPEPVTVSWNSGALTS |
| | GVHTFPAVLQSSGLYSLSSVVTVPSSSLGTQTYICNVNHKPSNTKVDKKVEPKSCDKTHTCPPCPAPEFEGGPSVFLFPPKPKD |
| | TLMISRTPEVTCVVVAVSHEDPEVKFNWYVDGVEVHNAKTKPREEQYNSTYRVVSVLTVLHQDWLNGKEYKCKVSNKALPAPIE |
| | KTISKAKGQPREPQVYTLPPSREEMTKNQVSLWCLVKGFYPSDIAVEWESNGQPENNYKTTPPVLDSDGSFFLYSKLTVDKSRW |
| | QQGNVFSCSVMHEALHNHYTQKSLSLSPGGGGGSGGGGSGGGGSGGGGSGGGGSGGGGSQVQLVESGGGLVKPGGSLRLSCAAS |
| | GFTFSSYGMHWVRQAPGKGLEWVAFIRYDGSNKYYADSVKGRFTISRDNSKNTLYLQMNSLRAEDTAVYYCAKDRGLGDGTYFD |
| | YWGQGTTVTVSSGGSGGSGGSGGSGGSGGSQSALTQPASVSGSPGQSITISCSGSSSNIGNNAVNWYQQLPGKAPKLLIYYDDL |
| | LPSGVSDRFSGSKSGTSAFLAISGLQSEDEADYYCAAWDDSLNGPVFGGGTKLTVL |
| 435 | AIG-2scFv-8 Chain2: |
| | DIQMTQSPSSLSASVGDRVTITCRASQDVNTAVAWYQQKPGKAPKLLIYSASFLYSGVPSRFSGSRSGTDFTLTISSLQPEDFA |
| | TYYCQQHYTTPPTFGQGTKVEIKRTVAAPSVFIFPPSDEQLKSGTASVVCLLNNFYPREAKVQWKVDNALQSGNSQESVTEQDS |
| | KDSTYSLSSTLTLSKADYEKHKVYACEVTHQGLSSPVTKSFNRGEC |
| 436 | AIG-2scFv-8 Chain3: |
| | EVQLVESGGGLVQPGGSLRLSCAASGFNIKDTYIHWVRQAPGKGLEWVARIYPTNGYTRYADSVKGRFTISADTSKNTAYLQMN |
| | SLRAEDTAVYYCSRWGGDGFYAMDYWGQGTLVTVSSASTKGPSVFPLAPSSKSTSGGTAALGCLVKDYFPEPVTVSWNSGALTS |
| | GVHTFPAVLQSSGLYSLSSVVTVPSSSLGTQTYICNVNHKPSNTKVDKKVEPKSCDKTHTCPPCPAPEFEGGPSVFLFPPKPKD |
| | TLMISRTPEVTCVVVAVSHEDPEVKFNWYVDGVEVHNAKTKPREEQYNSTYRVVSVLTVLHQDWLNGKEYKCKVSNKALPAPIE |
| | KTISKAKGQPREPQVYTLPPSREEMTKNQVSLSCAVKGFYPSDIAVEWESNGQPENNYKTTPPVLDSDGSFFLVSKLTVDKSRW |
| | QQGNVFSCSVMHEALHNHYTQKSLSLSPGGGGGSGGGGSGGGGSGGGGSGGGGSGGGGSSYELTQPLSVSVALGQTARITCGGH |
| | NIGSKNVHWYQQKPGQAPVLVIYQDNKRPSGIPERFSGSNSGNTATLTISRAQAGDEADYYCQVWDNYNVLFGCGTKLTVLGGS |
| | GGSGGSGGSGGSGGSGGSEVQLVQSGAEVKKPGASVKVSCKASGYTFTSYYMHWVRQAPGQCLEWMGAIEPTYGSTSYAQKFQG |
| | RVTMTRDTSTSTVYMELSSLRSEDTAVYYCARGSAYYYDFADYWGQGTLVTVSS |
| 437 | AIG-2scFv-10 Chain1: |
| | EVQLVESGGGLVQPGGSLRLSCAASGFNIKDTYIHWVRQAPGKGLEWVARIYPTNGYTRYADSVKGRFTISADTSKNTAYLQMN |
| | SLRAEDTAVYYCSRWGGDGFYAMDYWGQGTLVTVSSASTKGPSVFPLAPSSKSTSGGTAALGCLVKDYFPEPVTVSWNSGALTS |
| | GVHTFPAVLQSSGLYSLSSVVTVPSSSLGTQTYICNVNHKPSNTKVDKKVEPKSCDKTHTCPPCPAPEFEGGPSVFLFPPKPKD |
| | TLMISRTPEVTCVVVAVSHEDPEVKFNWYVDGVEVHNAKTKPREEQYNSTYRVVSVLTVLHQDWLNGKEYKCKVSNKALPAPIE |
| | KTISKAKGQPREPQVYTLPPSREEMTKNQVSLWCLVKGFYPSDIAVEWESNGQPENNYKTTPPVLDSDGSFFLYSKLTVDKSRW |
| | QQGNVFSCSVMHEALHNHYTQKSLSLSPGGGGGSGGGGSGGGGSGGGGSGGGGSGGGGSQSALTQPASVSGSPGQSITISCSGS |
| | SSNIGNNAVNWYQQLPGKAPKLLIYYDDLLPSGVSDRFSGSKSGTSAFLAISGLQSEDEADYYCAAWDDSLNGPVFGGGTKLTV |
| | LGGSGGSGGSGGSGGSGGSGGSQVQLVESGGGLVKPGGSLRLSCAASGFTFSSYGMHWVRQAPGKGLEWVAFIRYDGSNKYYAD |
| | SVKGRFTISRDNSKNTLYLQMNSLRAEDTAVYYCAKDRGLGDGTYFDYWGQGTTVTVSS |
| 438 | AIG-2scFv-10 Chain2: |
| | DIQMTQSPSSLSASVGDRVTITCRASQDVNTAVAWYQQKPGKAPKLLIYSASFLYSGVPSRFSGSRSGTDFTLTISSLQPEDFA |
| | TYYCQQHYTTPPTFGQGTKVEIKRTVAAPSVFIFPPSDEQLKSGTASVVCLLNNFYPREAKVQWKVDNALQSGNSQESVTEQDS |
| | KDSTYSLSSTLTLSKADYEKHKVYACEVTHQGLSSPVTKSFNRGEC |
| 439 | AIG-2scFv-10 Chain3: |
| | EVQLVESGGGLVQPGGSLRLSCAASGFNIKDTYIHWVRQAPGKGLEWVARIYPTNGYTRYADSVKGRFTISADTSKNTAYLQMN |
| | SLRAEDTAVYYCSRWGGDGFYAMDYWGQGTLVTVSSASTKGPSVFPLAPSSKSTSGGTAALGCLVKDYFPEPVTVSWNSGALTS |
| | GVHTFPAVLQSSGLYSLSSVVTVPSSSLGTQTYICNVNHKPSNTKVDKKVEPKSCDKTHTCPPCPAPEFEGGPSVFLFPPKPKD |
| | TLMISRTPEVTCVVVAVSHEDPEVKFNWYVDGVEVHNAKTKPREEQYNSTYRVVSVLTVLHQDWLNGKEYKCKVSNKALPAPIE |
| | KTISKAKGQPREPQVYTLPPSREEMTKNQVSLSCAVKGFYPSDIAVEWESNGQPENNYKTTPPVLDSDGSFFLVSKLTVDKSRW |
| | QQGNVFSCSVMHEALHNHYTQKSLSLSPGGGGGSGGGGSGGGGSGGGGSGGGGSGGGGSSYELTQPLSVSVALGQTARITCGGH |
| | NIGSKNVHWYQQKPGQAPVLVIYQDNKRPSGIPERFSGSNSGNTATLTISRAQAGDEADYYCQVWDNYNVLFGCGTKLTVLGGS |
| | GGSGGSGGSGGSGGSGGSEVQLVQSGAEVKKPGASVKVSCKASGYTFTSYYMHWVRQAPGQCLEWMGAIEPTYGSTSYAQKFQG |
| | RVTMTRDTSTSTVYMELSSLRSEDTAVYYCARGSAYYYDFADYWGQGTLVTVSS |
| 440 | AIG-2scFv-14 Chain1: |
| | EVQLVESGGGLVQPGGSLRLSCAASGFNIKDTYIHWVRQAPGKGLEWVARIYPTNGYTRYADSVKGRFTISADTSKNTAYLQMN |
| | SLRAEDTAVYYCSRWGGDGFYAMDYWGQGTLVTVSSASTKGPSVFPLAPSSKSTSGGTAALGCLVKDYFPEPVTVSWNSGALTS |
| | GVHTFPAVLQSSGLYSLSSVVTVPSSSLGTQTYICNVNHKPSNTKVDKKVEPKSCDKTHTCPPCPAPEFEGGPSVFLFPPKPKD |
| | TLMISRTPEVTCVVVAVSHEDPEVKFNWYVDGVEVHNAKTKPREEQYNSTYRVVSVLTVLHQDWLNGKEYKCKVSNKALPAPIE |
| | KTISKAKGQPREPQVYTLPPSREEMTKNQVSLWCLVKGFYPSDIAVEWESNGQPENNYKTTPPVLDSDGSFFLYSKLTVDKSRW |
| | QQGNVFSCSVMHEALHNHYTQKSLSLSPGGGGGSGGGGSGGGGSGGGGSGGGGSGGGGSQSALTQPASVSGSPGQSITISCSGS |
| | SSNIGNNAVNWYQQLPGKAPKLLIYYDDLLPSGVSDRFSGSKSGTSAFLAISGLQSEDEADYYCAAWDDSLNGPVFGGGTKLTV |
| | LGGSGGSGGSGGSGGSGGSGGSQVQLVESGGGLVKPGGSLRLSCAASGFTFSSYGMHWVRQAPGKGLEWVAFIRYDGSNKYYAD |
| | SVKGRFTISRDNSKNTLYLQMNSLRAEDTAVYYCAKDRGLGDGTYFDYWGQGTTVTVSS |
| 441 | AIG-2scFv-14 Chain2: |
| | DIQMTQSPSSLSASVGDRVTITCRASQDVNTAVAWYQQKPGKAPKLLIYSASFLYSGVPSRFSGSRSGTDFTLTISSLQPEDFA |
| | TYYCQQHYTTPPTFGQGTKVEIKRTVAAPSVFIFPPSDEQLKSGTASVVCLLNNFYPREAKVQWKVDNALQSGNSQESVTEQDS |
| | KDSTYSLSSTLTLSKADYEKHKVYACEVTHQGLSSPVTKSFNRGEC |
| 442 | AIG-2scFv-14 Chain3: |
| | EVQLVESGGGLVQPGGSLRLSCAASGFNIKDTYIHWVRQAPGKGLEWVARIYPTNGYTRYADSVKGRFTISADTSKNTAYLQMN |
| | SLRAEDTAVYYCSRWGGDGFYAMDYWGQGTLVTVSSASTKGPSVFPLAPSSKSTSGGTAALGCLVKDYFPEPVTVSWNSGALTS |
| | GVHTFPAVLQSSGLYSLSSVVTVPSSSLGTQTYICNVNHKPSNTKVDKKVEPKSCDKTHTCPPCPAPEFEGGPSVFLFPPKPKD |
| | TLMISRTPEVTCVVVAVSHEDPEVKFNWYVDGVEVHNAKTKPREEQYNSTYRVVSVLTVLHQDWLNGKEYKCKVSNKALPAPIE |
| | KTISKAKGQPREPQVYTLPPSREEMTKNQVSLSCAVKGFYPSDIAVEWESNGQPENNYKTTPPVLDSDGSFFLVSKLTVDKSRW |
| | QQGNVFSCSVMHEALHNHYTQKSLSLSPGGGGGSGGGGSGGGGSGGGGSGGGGSGGGGSQSALTQPASVSGSPGQSITISCSGS |
| | SSNIGNNAVNWYQQLPGKAPKLLIYYDDLLPSGVSDRFSGSKSGTSAFLAISGLQSEDEADYYCAAWDDSLNGPVFGGGTKLTV |
| | LGGSGGSGGSGGSGGSGGSGGSQVQLVESGGGLVKPGGSLRLSCAASGFTFSSYGMHWVRQAPGKGLEWVAFIRYDGSNKYYAD |
| | SVKGRFTISRDNSKNTLYLQMNSLRAEDTAVYYCAKDRGLGDGTYFDYWGQGTTVTVSS |
| 443 | AIG-2scFv-15 Chain1: |
| | EVQLVESGGGLVQPGGSLRLSCAASGFNIKDTYIHWVRQAPGKGLEWVARIYPTNGYTRYADSVKGRFTISADTSKNTAYLQMN |
| | SLRAEDTAVYYCSRWGGDGFYAMDYWGQGTLVTVSSASTKGPSVFPLAPSSKSTSGGTAALGCLVKDYFPEPVTVSWNSGALTS |
| | GVHTFPAVLQSSGLYSLSSVVTVPSSSLGTQTYICNVNHKPSNTKVDKKVEPKSCDKTHTCPPCPAPEFEGGPSVFLFPPKPKD |
| | TLMISRTPEVTCVVVAVSHEDPEVKFNWYVDGVEVHNAKTKPREEQYNSTYRVVSVLTVLHQDWLNGKEYKCKVSNKALPAPIE |
| | KTISKAKGQPREPQVYTLPPSREEMTKNQVSLWCLVKGFYPSDIAVEWESNGQPENNYKTTPPVLDSDGSFFLYSKLTVDKSRW |
| | QQGNVFSCSVMHEALHNHYTQKSLSLSPGGGGGSGGGGSGGGGSGGGGSGGGGSGGGGSDIQMTQSPSTLSASVGDRVTITCSA |
| | SSRVGYMHWYQQKPGKAPKLLIYDTSKLASGVPSRFSGSGSGTEFTLTISSLQPDDFATYYCFQGSGYPFTFGGGTKVEIKGGS |
| | GGSGGSGGSGGSGGSGGSQVTLRESGPALVKPTQTLTLTCTFSGFSLSTAGMSVGWIRQPPGKALEWLADIWWDDKKHYNPSLK |
| | DRLTISKDTSKNQVVLKVTNMDPADTATYYCARDMIFNFYFDVWGQGTTVTVSS |
| 444 | AIG-2scFv-15 Chain2: |
| | DIQMTQSPSSLSASVGDRVTITCRASQDVNTAVAWYQQKPGKAPKLLIYSASFLYSGVPSRFSGSRSGTDFTLTISSLQPEDFA |
| | TYYCQQHYTTPPTFGQGTKVEIKRTVAAPSVFIFPPSDEQLKSGTASVVCLLNNFYPREAKVQWKVDNALQSGNSQESVTEQDS |
| | KDSTYSLSSTLTLSKADYEKHKVYACEVTHQGLSSPVTKSFNRGEC |
| 445 | AIG-2scFv-15 Chain3: |
| | EVQLVESGGGLVQPGGSLRLSCAASGFNIKDTYIHWVRQAPGKGLEWVARIYPTNGYTRYADSVKGRFTISADTSKNTAYLQMN |
| | SLRAEDTAVYYCSRWGGDGFYAMDYWGQGTLVTVSSASTKGPSVFPLAPSSKSTSGGTAALGCLVKDYFPEPVTVSWNSGALTS |
| | GVHTFPAVLQSSGLYSLSSVVTVPSSSLGTQTYICNVNHKPSNTKVDKKVEPKSCDKTHTCPPCPAPEFEGGPSVFLFPPKPKD |
| | TLMISRTPEVTCVVVAVSHEDPEVKFNWYVDGVEVHNAKTKPREEQYNSTYRVVSVLTVLHQDWLNGKEYKCKVSNKALPAPIE |
| | KTISKAKGQPREPQVYTLPPSREEMTKNQVSLSCAVKGFYPSDIAVEWESNGQPENNYKTTPPVLDSDGSFFLVSKLTVDKSRW |
| | QQGNVFSCSVMHEALHNHYTQKSLSLSPGGGGGSGGGGSGGGGSGGGGSGGGGSGGGGSQSALTQPASVSGSPGQSITISCSGS |
| | SSNIGNNAVNWYQQLPGKAPKLLIYYDDLLPSGVSDRFSGSKSGTSAFLAISGLQSEDEADYYCAAWDDSLNGPVFGGGTKLTV |
| | LGGSGGSGGSGGSGGSGGSGGSQVQLVESGGGLVKPGGSLRLSCAASGFTFSSYGMHWVRQAPGKGLEWVAFIRYDGSNKYYAD |
| | SVKGRFTISRDNSKNTLYLQMNSLRAEDTAVYYCAKDRGLGDGTYFDYWGQGTTVTVSS |
| 446 | AIG-1scFv-4 Chain1: |
| | EVQLVESGGGLVQPGGSLRLSCAASGFNIKDTYIHWVRQAPGKGLEWVARIYPTNGYTRYADSVKGRFTISADTSKNTAYLQMN |
| | SLRAEDTAVYYCSRWGGDGFYAMDYWGQGTLVTVSSASTKGPSVFPLAPSSKSTSGGTAALGCLVKDYFPEPVTVSWNSGALTS |
| | GVHTFPAVLQSSGLYSLSSVVTVPSSSLGTQTYICNVNHKPSNTKVDKKVEPKSCDKTHTCPPCPAPEFEGGPSVFLFPPKPKD |
| | TLMISRTPEVTCVVVAVSHEDPEVKFNWYVDGVEVHNAKTKPREEQYNSTYRVVSVLTVLHQDWLNGKEYKCKVSNKALPAPIE |
| | KTISKAKGQPREPQVYTLPPSREEMTKNQVSLWCLVKGFYPSDIAVEWESNGQPENNYKTTPPVLDSDGSFFLYSKLTVDKSRW |
| | QQGNVFSCSVMHEALHNHYTQKSLSLSPG |
| 447 | AIG-1scFv-4 Chain2: |
| | DIQMTQSPSSLSASVGDRVTITCRASQDVNTAVAWYQQKPGKAPKLLIYSASFLYSGVPSRFSGSRSGTDFTLTISSLQPEDFA |
| | TYYCQQHYTTPPTFGQGTKVEIKRTVAAPSVFIFPPSDEQLKSGTASVVCLLNNFYPREAKVQWKVDNALQSGNSQESVTEQDS |
| | KDSTYSLSSTLTLSKADYEKHKVYACEVTHQGLSSPVTKSFNRGEC |
| 448 | AIG-1scFv-4 Chain3: |
| | EVQLVESGGGLVQPGGSLRLSCAASGFNIKDTYIHWVRQAPGKGLEWVARIYPTNGYTRYADSVKGRFTISADTSKNTAYLQMN |
| | SLRAEDTAVYYCSRWGGDGFYAMDYWGQGTLVTVSSASTKGPSVFPLAPSSKSTSGGTAALGCLVKDYFPEPVTVSWNSGALTS |
| | GVHTFPAVLQSSGLYSLSSVVTVPSSSLGTQTYICNVNHKPSNTKVDKKVEPKSCDKTHTCPPCPAPEFEGGPSVFLFPPKPKD |
| | TLMISRTPEVTCVVVAVSHEDPEVKFNWYVDGVEVHNAKTKPREEQYNSTYRVVSVLTVLHQDWLNGKEYKCKVSNKALPAPIE |
| | KTISKAKGQPREPQVYTLPPSREEMTKNQVSLSCAVKGFYPSDIAVEWESNGQPENNYKTTPPVLDSDGSFFLVSKLTVDKSRW |
| | QQGNVFSCSVMHEALHNHYTQKSLSLSPGGGGGSGGGGSGGGGSGGGGSGGGGSGGGGSQSALTQPASVSGSPGQSITISCSGS |
| | SSNIGNNAVNWYQQLPGKAPKLLIYYDDLLPSGVSDRFSGSKSGTSAFLAISGLQSEDEADYYCAAWDDSLNGPVFGGGTKLTV |
| | LGGSGGSGGSGGSGGSGGSGGSQVQLVESGGGLVKPGGSLRLSCAASGFTFSSYGMHWVRQAPGKGLEWVAFIRYDGSNKYYAD |
| | SVKGRFTISRDNSKNTLYLQMNSLRAEDTAVYYCAKDRGLGDGTYFDYWGQGTTVTVSS |
| 449 | Human CD16A |
| | MWQLLLPTALLLLVSAGMRTEDLPKAVVFLEPQWYRVLEKDSVTLKCQGAYSPEDNSTQWFHNESLISSQASSYFIDAATVDDS |
| | GEYRCQTNLSTLSDPVQLEVHIGWLLLQAPRWVFKEEDPIHLRCHSWKNTALHKVTYLQNGKGRKYFHHNSDFYIPKATLKDSG |
| | SYFCRGLFGSKNVSSETVNITITQGLAVSTISSFFPPGYQVSFCLVMVLLFAVDTGLYFSVKTNIRSSTRDWKDHKFKWRKDPQ |
| | DK |
| 450 | Human CD16B |
| | MWQLLLPTALLLLVSAGMRTEDLPKAVVFLEPQWYSVLEKDSVTLKCQGAYSPEDNSTQWFHNESLISSQASSYFIDAATVNDS |
| | GEYRCQTNLSTLSDPVQLEVHIGWLLLQAPRWVFKEEDPIHLRCHSWKNTALHKVTYLQNGKDRKYFHHNSDFHIPKATLKDSG |
| | SYFCRGLVGSKNVSSETVNITITQGLAVSTISSFSPPGYQVSFCLVMVLLFAVDTGLYFSVKTNI |
| 451 | Linker |
| | GGGS |
| 452 | IgG2 subtype hinge: |
| | ERKCCVECPPCP |
| 453 | IgG3 subtype hinge: |
| | ELKTPLDTTHTCPRCP |
| 454 | IgG3 subtype hinge: |
| | ELKTPLGDTTHTCPRCP |
| 455 | IgG4 subtype hinge: |
| | ESKYGPPCPSCP |
| 456 | VH CD89-1: |
| | QVQLVESGGGVVQPGRSLRLSCAASGFTFSSYVLHWVRQAPGKGLDWVAVISDDGRNKYFADSVKGRFTISRDNSKNTLYLQMN |
| | SLRAEDTAVYYCVREGYSGSWFDYWGQGTLVTVSS |
| 457 | VH CD89-2: |
| | EIQLQQTGPELVKPGASVKISCKASGYSFTDYIIFWVKQSHGKSLEWTGNINPYYGSTSYNLKFKGKATLTVDKSSSTAYMQLN |
| | SLTSEDSAVYYCVRGVYYYGSSYEAFPYWGQGTLVTVSA |
| 458 | VL CD89-1: |
| | AIQLTQSPSSLSASVGDRVTITCRASQGISSALAWYQQKPGKAPKLLIYGASSLEGGVPSRFSGSGSGTDFTLTISSLQPEDFA |
| | TYYCQQFNSYPFTFGPGTKVDIK |
| 459 | VL CD89-2: |
| | DIQLTQSPLTLSITIGQPASISCKSSQSLLDSDGKTYLNWLLQRPGQSPTRLIYLVSKLDSGVPDRFTGSGSGTDFTLKISRVE |
| | AEDLGIYYCWQGAHFPQTFGGGTKLEIK |
| 460 | HCDR1 CD89-1: |
| | SYVLH |
| 461 | HCDR2 CD89-1: |
| | VISDDGRNKYFADSVKG |
| 462 | HCDR3 CD89-1: |
| | EGYSGSWFDY |
| 463 | LCDR1 CD89-1: |
| | RASQGISSALA |
| 464 | LCDR2 CD89-1: |
| | GASSLEG |
| 465 | LCDR3 CD89-1: |
| | QQFNSYPFT |
| 466 | HCDR1 CD89-2: |
| | DYIIF |
| 467 | HCDR2 CD89-2: |
| | NINPYYGSTSYNLKFKG |
| 468 | HCDR3 CD89-2: |
| | GVYYYGSSYEAFPY |
| 469 | LCDR1 CD89-2: |
| | KSSQSLLDSDGKTYLN |
| 470 | LCDR2 CD89-2: |
| | LVSKLDS |
| 471 | LCDR3 CD89-2: |
| | WQGAHFPQT |
| 472 | BisscDb-25: CD16A-1 × CD89-1 |
| | SYELTQPLSVSVALGQTARITCGGHNIGSKNVHWYQQKPGQAPVLVIYQDNKRPSGIPERFSGSNSGNTATLTISRAQAGDEAD |
| | YYCQVWDNYNVLFGCGTKLTVLGGSGGSQVQLVESGGGVVQPGRSLRLSCAASGFTFSSYVLHWVRQAPGKGLDWVAVISDDGR |
| | NKYFADSVKGRFTISRDNSKNTLYLQMNSLRAEDTAVYYCVREGYSGSWFDYWGQGTLVTVSSGGSGGSGGSGGSGGSGGSAIQ |
| | LTQSPSSLSASVGDRVTITCRASQGISSALAWYQQKPGKAPKLLIYGASSLEGGVPSRFSGSGSGTDFTLTISSLQPEDFATYY |
| | SYAQKFQGRVTMTRDTSTSTVYMELSSLRSEDTAVYYCARGSAYYYDFADYWGQGTLVTVSS |
| 473 | BisscDb-26: CD16A-1 × CD89-2 |
| | SYELTQPLSVSVALGQTARITCGGHNIGSKNVHWYQQKPGQAPVLVIYQDNKRPSGIPERFSGSNSGNTATLTISRAQAGDEAD |
| | YYCQVWDNYNVLFGCGTKLTVLGGSGGSEIQLQQTGPELVKPGASVKISCKASGYSFTDYIIFWVKQSHGKSLEWTGNINPYYG |
| | STSYNLKFKGKATLTVDKSSSTAYMQLNSLTSEDSAVYYCVRGVYYYGSSYEAFPYWGQGTLVTVSAGGSGGSGGSGGSGGSGG |
| | SDIQLTQSPLTLSITIGQPASISCKSSQSLLDSDGKTYLNWLLQRPGQSPTRLIYLVSKLDSGVPDRFTGSGSGTDFTLKISRV |
| | EAEDLGIYYCWQGAHFPQTFGGGTKLEIKGGSGGSQVQLVQSGAEVKKPGASVKVSCKASGYTFTSYYMHWVRQAPGQCLEWMG |
| | AIEPTYGSTSYAQKFQGRVTMTRDTSTSTVYMELSSLRSEDTAVYYCARGSAYYYDFADYWGQGTLVTVSS |
| 474 | BisscDb-27: CD89-1 × EGFR-1 |
| | QVQLVESGGGVVQPGRSLRLSCAASGFTFSSYVLHWVRQAPGKGLDWVAVISDDGRNKYFADSVKGRFTISRDNSKNTLYLQMN |
| | SLRAEDTAVYYCVREGYSGSWFDYWGQGTLVTVSSGGSGGSGGSQPVLTQPPSVSVAPGKTARITCGGNNIGSKSVHWYQQKPG |
| | QAPVLVIYYDSDRPSGIPERFSGSNSGNTATLTISRVEAGDEADYYCQVWDTSSDHVLFGGGTKLTVLGGSGGSGGSGGSGGSG |
| | GSGGSQVQLQESGPGLVKPSETLSLTCTVSGGSVSSGSYYWSWIRQPPGKGLEWIGYIYYSGSTNYNPSLKSRVTISVDTSKNQ |
| | FSLKLSSVTAADTAVYYCARNPISIPAFDIWGQGTMVTVSSGGSGGSGGSAIQLTQSPSSLSASVGDRVTITCRASQGISSALA |
| | WYQQKPGKAPKLLIYGASSLEGGVPSRFSGSGSGTDFTLTISSLQPEDFATYYCQQFNSYPFTFGPGTKVDIK |
| 475 | BisscDb-28: CD89-1 × CD19 (MOR208) |
| | QVQLVESGGGVVQPGRSLRLSCAASGFTFSSYVLHWVRQAPGKGLDWVAVISDDGRNKYFADSVKGRFTISRDNSKNTLYLQMN |
| | SLRAEDTAVYYCVREGYSGSWFDYWGQGTLVTVSSGGSGGSGGSDIVMTQSPATLSLSPGERATLSCRSSKSLQNVNGNTYLYW |
| | FQQKPGQSPQLLIYRMSNLNSGVPDRFSGSGSGTEFTLTISSLEPEDFAVYYCMQHLEYPITFGAGTKLEIKGGSGGSGGSGGS |
| | GGSGGSGGSEVQLVESGGGLVKPGGSLKLSCAASGYTFTSYVMHWVRQAPGKGLEWIGYINPYNDGTKYNEKFQGRVTISSDKS |
| | ISTAYMELSSLRSEDTAMYYCARGTYYYGTRVFDYWGQGTLVTVSSGGSGGSGGSAIQLTQSPSSLSASVGDRVTITCRASQGI |
| | SSALAWYQQKPGKAPKLLIYGASSLEGGVPSRFSGSGSGTDFTLTISSLQPEDFATYYCQQFNSYPFTFGPGTKVDIK |
| 476 | BisscDb-29: CD89-2 × EGFR-1 |
| | EIQLQQTGPELVKPGASVKISCKASGYSFTDYIIFWVKQSHGKSLEWTGNINPYYGSTSYNLKFKGKATLTVDKSSSTAYMQLN |
| | SLTSEDSAVYYCVRGVYYYGSSYEAFPYWGQGTLVTVSAGGSGGSGGSQPVLTQPPSVSVAPGKTARITCGGNNIGSKSVHWYQ |
| | QKPGQAPVLVIYYDSDRPSGIPERFSGSNSGNTATLTISRVEAGDEADYYCQVWDTSSDHVLFGGGTKLTVLGGSGGSGGSGGS |
| | GGSGGSGGSQVQLQESGPGLVKPSETLSLTCTVSGGSVSSGSYYWSWIRQPPGKGLEWIGYIYYSGSTNYNPSLKSRVTISVDT |
| | SKNQFSLKLSSVTAADTAVYYCARNPISIPAFDIWGQGTMVTVSSGGSGGSGGSDIQLTQSPLTLSITIGQPASISCKSSQSLL |
| | DSDGKTYLNWLLQRPGQSPTRLIYLVSKLDSGVPDRFTGSGSGTDFTLKISRVEAEDLGIYYCWQGAHFPQTFGGGTKLEIK |
| 477 | BisscDb-30: CD89-2 × CD19 (MOR208) |
| | EIQLQQTGPELVKPGASVKISCKASGYSFTDYIIFWVKQSHGKSLEWTGNINPYYGSTSYNLKFKGKATLTVDKSSSTAYMQLN |
| | SLTSEDSAVYYCVRGVYYYGSSYEAFPYWGQGTLVTVSAGGSGGSGGSDIVMTQSPATLSLSPGERATLSCRSSKSLQNVNGNT |
| | YLYWFQQKPGQSPQLLIYRMSNLNSGVPDRFSGSGSGTEFTLTISSLEPEDFAVYYCMQHLEYPITFGAGTKLEIKGGSGGSGG |
| | SGGSGGSGGSGGSEVQLVESGGGLVKPGGSLKLSCAASGYTFTSYVMHWVRQAPGKGLEWIGYINPYNDGTKYNEKFQGRVTIS |
| | SDKSISTAYMELSSLRSEDTAMYYCARGTYYYGTRVFDYWGQGTLVTVSSGGSGGSGGSDIQLTQSPLTLSITIGQPASISCKS |
| | SQSLLDSDGKTYLNWLLQRPGQSPTRLIYLVSKLDSGVPDRFTGSGSGTDFTLKISRVEAEDLGIYYCWQGAHFPQTFGGGTKL |
| | EIK |
| 478 | scDb-8: CD89-1 |
| | AIQLTQSPSSLSASVGDRVTITCRASQGISSALAWYQQKPGKAPKLLIYGASSLEGGVPSRFSGSGSGTDFTLTISSLQPEDFA |
| | TYYCQQFNSYPFTFGPGTKVDIKGGSGGSQVQLVESGGGVVQPGRSLRLSCAASGFTFSSYVLHWVRQAPGKGLDWVAVISDDG |
| | RNKYFADSVKGRFTISRDNSKNTLYLQMNSLRAEDTAVYYCVREGYSGSWFDYWGQGTLVTVSSGGSGGSGGSGGSGGSGGS |
| | AIQLTQSPSSLSASVGDRVTITCRASQGISSALAWYQQKPGKAPKLLIYGASSLEGGVPSRFSGSGSGTDFTLTISSLQPEDFA |
| | TYYCQQFNSYPFTFGPGTKVDIKGGSGGSQVQLVESGGGVVQPGRSLRLSCAASGFTFSSYVLHWVRQAPGKGLDWVAVISDDG |
| | RNKYFADSVKGRFTISRDNSKNTLYLQMNSLRAEDTAVYYCVREGYSGSWFDYWGQGTLVTVSS |
| 479 | scDb-9: CD89-2 |
| | DIQLTQSPLTLSITIGQPASISCKSSQSLLDSDGKTYLNWLLQRPGQSPTRLIYLVSKLDSGVPDRFTGSGSGTDFTLKISRVE |
| | AEDLGIYYCWQGAHFPQTFGGGTKLEIKGGSGGSEIQLQQTGPELVKPGASVKISCKASGYSFTDYIIFWVKQSHGKSLEWTGN |
| | INPYYGSTSYNLKFKGKATLTVDKSSSTAYMQLNSLTSEDSAVYYCVRGVYYYGSSYEAFPYWGQGTLVTVSAGGSGGSGGSGG |
| | SGGSGGSDIQLTQSPLTLSITIGQPASISCKSSQSLLDSDGKTYLNWLLQRPGQSPTRLIYLVSKLDSGVPDRFTGSGSGTDFT |
| | LKISRVEAEDLGIYYCWQGAHFPQTFGGGTKLEIKGGSGGSEIQLQQTGPELVKPGASVKISCKASGYSFTDYIIFWVKQSHGK |
| | SLEWTGNINPYYGSTSYNLKFKGKATLTVDKSSSTAYMQLNSLTSEDSAVYYCVRGVYYYGSSYEAFPYWGQGTLVTVSA |
| 480 | ta-scFv-11: CD19 (MOR208) × CD89-1 |
| | EVQLVESGGGLVKPGGSLKLSCAASGYTFTSYVMHWVRQAPGKGLEWIGYINPYNDGTKYNEKFQGRVTISSDKSISTAYMELS |
| | SLRSEDTAMYYCARGTYYYGTRVFDYWGQGTLVTVSSGGSGGSGGSGGSGGSGGSDIVMTQSPATLSLSPGERATLSCRSSKSL |
| | QNVNGNTYLYWFQQKPGQSPQLLIYRMSNLNSGVPDRFSGSGSGTEFTLTISSLEPEDFAVYYCMQHLEYPITFGAGTKLEIKG |
| | GGGSAIQLTQSPSSLSASVGDRVTITCRASQGISSALAWYQQKPGKAPKLLIYGASSLEGGVPSRFSGSGSGTDFTLTISSLQP |
| | EDFATYYCQQFNSYPFTFGPGTKVDIKGGSGGSGGSGGSGGSGGSGGSQVQLVESGGGVVQPGRSLRLSCAASGFTFSSYVLHW |
| | VRQAPGKGLDWVAVISDDGRNKYFADSVKGRFTISRDNSKNTLYLQMNSLRAEDTAVYYCVREGYSGSWFDYWGQGTLVTVSS |
| 481 | ta-scFv-12: EGFR-2 × CD89-1 |
| | EVQLQESGPGLVKPSETLSLTCTVSGGSVSSGSYYWSWIRQPPGKGLEWIGYIYYSGSTNYNPSLKSRVTISVDTSKNQFSLKL |
| | SSVTAADTAVYYCARNPISIPAFDIWGQGTMVTVSSGGSGGSGGSGGSGGSGGSQPVLTQPPSVSVAPGKTARITCGGNNIGSK |
| | SVHWYQQKPGQAPVLVIYYDSDRPSGIPERFSGSNSGNTATLTISRVEAGDEADYYCQVWDTSSDHVLFGGGTKLTVLGGGGS |
| | AIQLTQSPSSLSASVGDRVTITCRASQGISSALAWYQQKPGKAPKLLIYGASSLEGGVPSRFSGSGSGTDFTLTISSLQPEDFA |
| | TYYCQQFNSYPFTFGPGTKVDIKGGSGGSGGSGGSGGSGGSGGSQVQLVESGGGVVQPGRSLRLSCAASGFTFSSYVLHWVRQA |
| | PGKGLDWVAVISDDGRNKYFADSVKGRFTISRDNSKNTLYLQMNSLRAEDTAVYYCVREGYSGSWFDYWGQGTLVTVSS |
| 482 | scFv-13: CD89-1 |
| | AIQLTQSPSSLSASVGDRVTITCRASQGISSALAWYQQKPGKAPKLLIYGASSLEGGVPSRFSGSGSGTDFTLTISSLQPEDFA |
| | TYYCQQFNSYPFTFGPGTKVDIKGGSGGSGGSGGSGGSGGSGGSQVQLVESGGGVVQPGRSLRLSCAASGFTFSSYVLHWVRQA |
| | PGKGLDWVAVISDDGRNKYFADSVKGRFTISRDNSKNTLYLQMNSLRAEDTAVYYCVREGYSGSWFDYWGQGTLVTVSS |
| 483 | scFv-14: CD89-2 |
| | DIQLTQSPLTLSITIGQPASISCKSSQSLLDSDGKTYLNWLLQRPGQSPTRLIYLVSKLDSGVPDRFTGSGSGTDFTLKISRVE |
| | AEDLGIYYCWQGAHFPQTFGGGTKLEIKGGSGGSGGSGGSGGSGGSGGSEIQLQQTGPELVKPGASVKISCKASGYSFTDYIIF |
| | WVKQSHGKSLEWTGNINPYYGSTSYNLKFKGKATLTVDKSSSTAYMQLNSLTSEDSAVYYCVRGVYYYGSSYEAFPYWGQGTLV |
| | TVSA |
| 484 | AIG-1scFv-6 Chain1: |
| | EVQLVESGGGLVQPGGSLRLSCAASGFNIKDTYIHWVRQAPGKGLEWVARIYPTNGYTRYADSVKGRFTISADTSKNTAYLQMN |
| | SLRAEDTAVYYCSRWGGDGFYAMDYWGQGTLVTVSSASTKGPSVFPLAPSSKSTSGGTAALGCLVKDYFPEPVTVSWNSGALTS |
| | GVHTFPAVLQSSGLYSLSSVVTVPSSSLGTQTYICNVNHKPSNTKVDKKVEPKSCDKTHTCPPCPAPEFEGGPSVFLFPPKPKD |
| | TLMISRTPEVTCVVVAVSHEDPEVKFNWYVDGVEVHNAKTKPREEQYNSTYRVVSVLTVLHQDWLNGKEYKCKVSNKALPAPIE |
| | KTISKAKGQPREPQVYTLPPSREEMTKNQVSLWCLVKGFYPSDIAVEWESNGQPENNYKTTPPVLDSDGSFFLYSKLTVDKSRW |
| | QQGNVFSCSVMHEALHNHYTQKSLSLSPG |
| 485 | AIG-1scFv-6 Chain2: |
| | EVQLVESGGGLVQPGGSLRLSCAASGFNIKDTYIHWVRQAPGKGLEWVARIYPTNGYTRYADSVKGRFTISADTSKNTAYLQMN |
| | SLRAEDTAVYYCSRWGGDGFYAMDYWGQGTLVTVSSASTKGPSVFPLAPSSKSTSGGTAALGCLVKDYFPEPVTVSWNSGALTS |
| | GVHTFPAVLQSSGLYSLSSVVTVPSSSLGTQTYICNVNHKPSNTKVDKKVEPKSCDKTHTCPPCPAPEFEGGPSVFLFPPKPKD |
| | TLMISRTPEVTCVVVAVSHEDPEVKFNWYVDGVEVHNAKTKPREEQYNSTYRVVSVLTVLHQDWLNGKEYKCKVSNKALPAPIE |
| | KTISKAKGQPREPQVYTLPPSREEMTKNQVSLSCAVKGFYPSDIAVEWESNGQPENNYKTTPPVLDSDGSFFLVSKLTVDKSRW |
| | QQGNVFSCSVMHEALHNHYTQKSLSLSPGGGGGSGGGGSGGGGSGGGGSGGGGSGGGGSAIQLTQSPSSLSASVGDRVTITCRA |
| | SQGISSALAWYQQKPGKAPKLLIYGASSLEGGVPSRFSGSGSGTDFTLTISSLQPEDFATYYCQQFNSYPFTFGPGTKVDIKGG |
| | SGGSGGSGGSGGSGGSGGSQVQLVESGGGVVQPGRSLRLSCAASGFTFSSYVLHWVRQAPGKGLDWVAVISDDGRNKYFADSVK |
| | GRFTISRDNSKNTLYLQMNSLRAEDTAVYYCVREGYSGSWFDYWGQGTLVTVSS |
| 486 | AIG-1scFv-6 Chain3: |
| | DIQMTQSPSSLSASVGDRVTITCRASQDVNTAVAWYQQKPGKAPKLLIYSASFLYSGVPSRFSGSRSGTDFTLTISSLQPEDFA |
| | TYYCQQHYTTPPTFGQGTKVEIKRTVAAPSVFIFPPSDEQLKSGTASVVCLLNNFYPREAKVQWKVDNALQSGNSQESVTEQDS |
| | KDSTYSLSSTLTLSKADYEKHKVYACEVTHQGLSSPVTKSFNRGEC |
| 487 | AIG-1scFv-7 Chain1: |
| | EVQLVESGGGLVQPGGSLRLSCAASGFNIKDTYIHWVRQAPGKGLEWVARIYPTNGYTRYADSVKGRFTISADTSKNTAYLQMN |
| | SLRAEDTAVYYCSRWGGDGFYAMDYWGQGTLVTVSSASTKGPSVFPLAPSSKSTSGGTAALGCLVKDYFPEPVTVSWNSGALTS |
| | GVHTFPAVLQSSGLYSLSSVVTVPSSSLGTQTYICNVNHKPSNTKVDKKVEPKSCDKTHTCPPCPAPEFEGGPSVFLFPPKPKD |
| | TLMISRTPEVTCVVVAVSHEDPEVKFNWYVDGVEVHNAKTKPREEQYNSTYRVVSVLTVLHQDWLNGKEYKCKVSNKALPAPIE |
| | KTISKAKGQPREPQVYTLPPSREEMTKNQVSLWCLVKGFYPSDIAVEWESNGQPENNYKTTPPVLDSDGSFFLYSKLTVDKSRW |
| | QQGNVFSCSVMHEALHNHYTQKSLSLSPG |
| 488 | AIG-1scFv-7 Chain2: |
| | EVQLVESGGGLVQPGGSLRLSCAASGFNIKDTYIHWVRQAPGKGLEWVARIYPTNGYTRYADSVKGRFTISADTSKNTAYLQMN |
| | SLRAEDTAVYYCSRWGGDGFYAMDYWGQGTLVTVSSASTKGPSVFPLAPSSKSTSGGTAALGCLVKDYFPEPVTVSWNSGALTS |
| | GVHTFPAVLQSSGLYSLSSVVTVPSSSLGTQTYICNVNHKPSNTKVDKKVEPKSCDKTHTCPPCPAPEFEGGPSVFLFPPKPKD |
| | TLMISRTPEVTCVVVAVSHEDPEVKFNWYVDGVEVHNAKTKPREEQYNSTYRVVSVLTVLHQDWLNGKEYKCKVSNKALPAPIE |
| | KTISKAKGQPREPQVYTLPPSREEMTKNQVSLSCAVKGFYPSDIAVEWESNGQPENNYKTTPPVLDSDGSFFLVSKLTVDKSRW |
| | QQGNVFSCSVMHEALHNHYTQKSLSLSPGGGGGSGGGGSGGGGSGGGGSGGGGSGGGGSDIQLTQSPLTLSITIGQPASISCKS |
| | SQSLLDSDGKTYLNWLLQRPGQSPTRLIYLVSKLDSGVPDRFTGSGSGTDFTLKISRVEAEDLGIYYCWQGAHFPQTFGGGTKL |
| | EIKGGSGGSGGSGGSGGSGGSGGSEIQLQQTGPELVKPGASVKISCKASGYSFTDYIIFWVKQSHGKSLEWTGNINPYYGSTSY |
| | NLKFKGKATLTVDKSSSTAYMQLNSLTSEDSAVYYCVRGVYYYGSSYEAFPYWGQGTLVTVSA |
| 489 | AIG-1scFv-7 Chain3: |
| | DIQMTQSPSSLSASVGDRVTITCRASQDVNTAVAWYQQKPGKAPKLLIYSASFLYSGVPSRFSGSRSGTDFTLTISSLQPEDFA |
| | TYYCQQHYTTPPTFGQGTKVEIKRTVAAPSVFIFPPSDEQLKSGTASVVCLLNNFYPREAKVQWKVDNALQSGNSQESVTEQDS |
| | KDSTYSLSSTLTLSKADYEKHKVYACEVTHQGLSSPVTKSFNRGEC |
| 490 | AIG-2scFv-28 Chain1: |
| | EVQLVESGGGLVQPGGSLRLSCAASGFNIKDTYIHWVRQAPGKGLEWVARIYPTNGYTRYADSVKGRFTISADTSKNTAYLQMN |
| | SLRAEDTAVYYCSRWGGDGFYAMDYWGQGTLVTVSSASTKGPSVFPLAPSSKSTSGGTAALGCLVKDYFPEPVTVSWNSGALTS |
| | GVHTFPAVLQSSGLYSLSSVVTVPSSSLGTQTYICNVNHKPSNTKVDKKVEPKSCDKTHTCPPCPAPEFEGGPSVFLFPPKPKD |
| | TLMISRTPEVTCVVVAVSHEDPEVKFNWYVDGVEVHNAKTKPREEQYNSTYRVVSVLTVLHQDWLNGKEYKCKVSNKALPAPIE |
| | KTISKAKGQPREPQVYTLPPSREEMTKNQVSLWCLVKGFYPSDIAVEWESNGQPENNYKTTPPVLDSDGSFFLYSKLTVDKSRW |
| | QQGNVFSCSVMHEALHNHYTQKSLSLSPGGGGGSGGGGSSYELTQPLSVSVALGQTARITCGGHNIGSKNVHWYQQKPGQAPVL |
| | VIYQDNKRPSGIPERFSGSNSGNTATLTISRAQAGDEADYYCQVWDNYNVLFGCGTKLTVLGGSGGSGGSGGSGGSGGSGGSQV |
| | QLVQSGAEVKKPGASVKVSCKASGYTFTSYYMHWVRQAPGQCLEWMGAIEPTYGSTSYAQKFQGRVTMTRDTSTSTVYMELSSL |
| | RSEDTAVYYCARGSAYYYDFADYWGQGTLVTVSS |
| 491 | AIG-2scFv-28 Chain2: |
| | EVQLVESGGGLVQPGGSLRLSCAASGFNIKDTYIHWVRQAPGKGLEWVARIYPTNGYTRYADSVKGRFTISADTSKNTAYLQMN |
| | SLRAEDTAVYYCSRWGGDGFYAMDYWGQGTLVTVSSASTKGPSVFPLAPSSKSTSGGTAALGCLVKDYFPEPVTVSWNSGALTS |
| | GVHTFPAVLQSSGLYSLSSVVTVPSSSLGTQTYICNVNHKPSNTKVDKKVEPKSCDKTHTCPPCPAPEFEGGPSVFLFPPKPKD |
| | TLMISRTPEVTCVVVAVSHEDPEVKFNWYVDGVEVHNAKTKPREEQYNSTYRVVSVLTVLHQDWLNGKEYKCKVSNKALPAPIE |
| | KTISKAKGQPREPQVYTLPPSREEMTKNQVSLSCAVKGFYPSDIAVEWESNGQPENNYKTTPPVLDSDGSFFLVSKLTVDKSRW |
| | QQGNVFSCSVMHEALHNHYTQKSLSLSPGGGGGSGGGGSGGGGSGGGGSGGGGSGGGGSAIQLTQSPSSLSASVGDRVTITCRA |
| | SQGISSALAWYQQKPGKAPKLLIYGASSLEGGVPSRFSGSGSGTDFTLTISSLQPEDFATYYCQQFNSYPFTFGPGTKVDIKGG |
| | SGGSGGSGGSGGSGGSGGSQVQLVESGGGVVQPGRSLRLSCAASGFTFSSYVLHWVRQAPGKGLDWVAVISDDGRNKYFADSVK |
| | GRFTISRDNSKNTLYLQMNSLRAEDTAVYYCVREGYSGSWFDYWGQGTLVTVSS |
| 492 | AIG-2scFv-28 Chain3: |
| | DIQMTQSPSSLSASVGDRVTITCRASQDVNTAVAWYQQKPGKAPKLLIYSASFLYSGVPSRFSGSRSGTDFTLTISSLQPEDFA |
| | TYYCQQHYTTPPTFGQGTKVEIKRTVAAPSVFIFPPSDEQLKSGTASVVCLLNNFYPREAKVQWKVDNALQSGNSQESVTEQDS |
| | KDSTYSLSSTLTLSKADYEKHKVYACEVTHQGLSSPVTKSFNRGEC |
| 493 | AIG-2scFv-29 Chain1: |
| | EVQLVESGGGLVQPGGSLRLSCAASGFNIKDTYIHWVRQAPGKGLEWVARIYPTNGYTRYADSVKGRFTISADTSKNTAYLQMN |
| | SLRAEDTAVYYCSRWGGDGFYAMDYWGQGTLVTVSSASTKGPSVFPLAPSSKSTSGGTAALGCLVKDYFPEPVTVSWNSGALTS |
| | GVHTFPAVLQSSGLYSLSSVVTVPSSSLGTQTYICNVNHKPSNTKVDKKVEPKSCDKTHTCPPCPAPEFEGGPSVFLFPPKPKD |
| | TLMISRTPEVTCVVVAVSHEDPEVKFNWYVDGVEVHNAKTKPREEQYNSTYRVVSVLTVLHQDWLNGKEYKCKVSNKALPAPIE |
| | KTISKAKGQPREPQVYTLPPSREEMTKNQVSLWCLVKGFYPSDIAVEWESNGQPENNYKTTPPVLDSDGSFFLYSKLTVDKSRW |
| | QQGNVFSCSVMHEALHNHYTQKSLSLSPGGGGGSGGGGSSYELTQPLSVSVALGQTARITCGGHNIGSKNVHWYQQKPGQAPVL |
| | VIYQDNKRPSGIPERFSGSNSGNTATLTISRAQAGDEADYYCQVWDNYNVLFGCGTKLTVLGGSGGSGGSGGSGGSGGSGGSQV |
| | QLVQSGAEVKKPGASVKVSCKASGYTFTSYYMHWVRQAPGQCLEWMGAIEPTYGSTSYAQKFQGRVTMTRDTSTSTVYMELSSL |
| | RSEDTAVYYCARGSAYYYDFADYWGQGTLVTVSS |
| 494 | AIG-2scFv-29 Chain2: |
| | EVQLVESGGGLVQPGGSLRLSCAASGFNIKDTYIHWVRQAPGKGLEWVARIYPTNGYTRYADSVKGRFTISADTSKNTAYLQMN |
| | SLRAEDTAVYYCSRWGGDGFYAMDYWGQGTLVTVSSASTKGPSVFPLAPSSKSTSGGTAALGCLVKDYFPEPVTVSWNSGALTS |
| | GVHTFPAVLQSSGLYSLSSVVTVPSSSLGTQTYICNVNHKPSNTKVDKKVEPKSCDKTHTCPPCPAPEFEGGPSVFLFPPKPKD |
| | TLMISRTPEVTCVVVAVSHEDPEVKFNWYVDGVEVHNAKTKPREEQYNSTYRVVSVLTVLHQDWLNGKEYKCKVSNKALPAPIE |
| | KTISKAKGQPREPQVYTLPPSREEMTKNQVSLSCAVKGFYPSDIAVEWESNGQPENNYKTTPPVLDSDGSFFLVSKLTVDKSRW |
| | QQGNVFSCSVMHEALHNHYTQKSLSLSPGGGGGSGGGGSGGGGSGGGGSGGGGSGGGGSDIQLTQSPLTLSITIGQPASISCKS |
| | SQSLLDSDGKTYLNWLLQRPGQSPTRLIYLVSKLDSGVPDRFTGSGSGTDFTLKISRVEAEDLGIYYCWQGAHFPQTFGGGTKL |
| | EIKGGSGGSGGSGGSGGSGGSGGSEIQLQQTGPELVKPGASVKISCKASGYSFTDYIIFWVKQSHGKSLEWTGNINPYYGSTSY |
| | NLKFKGKATLTVDKSSSTAYMQLNSLTSEDSAVYYCVRGVYYYGSSYEAFPYWGQGTLVTVSA |
| 495 | AIG-2scFv-29 Chain3: |
| | DIQMTQSPSSLSASVGDRVTITCRASQDVNTAVAWYQQKPGKAPKLLIYSASFLYSGVPSRFSGSRSGTDFTLTISSLQPEDFA |
| | TYYCQQHYTTPPTFGQGTKVEIKRTVAAPSVFIFPPSDEQLKSGTASVVCLLNNFYPREAKVQWKVDNALQSGNSQESVTEQDS |
| | KDSTYSLSSTLTLSKADYEKHKVYACEVTHQGLSSPVTKSFNRGEC |
| 496 | scFv-IgAb-441 Chain1: |
| | EVQLVESGGGLVQPGGSLRLSCAASGFNIKDTYIHWVRQAPGKGLEWVARIYPTNGYTRYADSVKGRFTISADTSKNTAYLQMN |
| | SLRAEDTAVYYCSRWGGDGFYAMDYWGQGTLVTVSSASTKGPSVFPLAPSSKSTSGGTAALGCLVKDYFPEPVTVSWNSGALTS |
| | GVHTFPAVLQSSGLYSLSSVVTVPSSSLGTQTYICNVNHKPSNTKVDKKVEPKSCDKTHTCPPCPAPEFEGGPSVFLFPPKPKD |
| | TLMISRTPEVTCVVVAVSHEDPEVKFNWYVDGVEVHNAKTKPREEQYNSTYRVVSVLTVLHQDWLNGKEYKCKVSNKALPAPIE |
| | KTISKAKGQPREPQVYTLPPSREEMTKNQVSLTCLVKGFYPSDIAVEWESNGQPENNYKTTPPVLDSDGSFFLYSKLTVDKSRW |
| | QQGNVFSCSVMHEALHNHYTQKSLSLSPGGGGGSGGGGSGGGGSGGGGSGGGGSGGGGSAIQLTQSPSSLSASVGDRVTITCRA |
| | SQGISSALAWYQQKPGKAPKLLIYGASSLEGGVPSRFSGSGSGTDFTLTISSLQPEDFATYYCQQFNSYPFTFGPGTKVDIKGG |
| | SGGSGGSGGSGGSGGSGGSQVQLVESGGGVVQPGRSLRLSCAASGFTFSSYVLHWVRQAPGKGLDWVAVISDDGRNKYFADSVK |
| | GRFTISRDNSKNTLYLQMNSLRAEDTAVYYCVREGYSGSWFDYWGQGTLVTVSS |
| 497 | scFv-IgAb-441 Chain2: |
| | DIQMTQSPSSLSASVGDRVTITCRASQDVNTAVAWYQQKPGKAPKLLIYSASFLYSGVPSRFSGSRSGTDFTLTISSLQPEDFA |
| | TYYCQQHYTTPPTFGQGTKVEIKRTVAAPSVFIFPPSDEQLKSGTASVVCLLNNFYPREAKVQWKVDNALQSGNSQESVTEQDS |
| | KDSTYSLSSTLTLSKADYEKHKVYACEVTHQGLSSPVTKSFNRGEC |
| 498 | scFv-IgAb-442 Chain1: |
| | EVQLVESGGGLVQPGGSLRLSCAASGFNIKDTYIHWVRQAPGKGLEWVARIYPTNGYTRYADSVKGRFTISADTSKNTAYLQMN |
| | SLRAEDTAVYYCSRWGGDGFYAMDYWGQGTLVTVSSASTKGPSVFPLAPSSKSTSGGTAALGCLVKDYFPEPVTVSWNSGALTS |
| | GVHTFPAVLQSSGLYSLSSVVTVPSSSLGTQTYICNVNHKPSNTKVDKKVEPKSCDKTHTCPPCPAPEFEGGPSVFLFPPKPKD |
| | TLMISRTPEVTCVVVAVSHEDPEVKFNWYVDGVEVHNAKTKPREEQYNSTYRVVSVLTVLHQDWLNGKEYKCKVSNKALPAPIE |
| | KTISKAKGQPREPQVYTLPPSREEMTKNQVSLTCLVKGFYPSDIAVEWESNGQPENNYKTTPPVLDSDGSFFLYSKLTVDKSRW |
| | QQGNVFSCSVMHEALHNHYTQKSLSLSPGGGGGSGGGGSGGGGSGGGGSGGGGSGGGGSDIQLTQSPLTLSITIGQPASISCKS |
| | SQSLLDSDGKTYLNWLLQRPGQSPTRLIYLVSKLDSGVPDRFTGSGSGTDFTLKISRVEAEDLGIYYCWQGAHFPQTFGGGTKL |
| | EIKGGSGGSGGSGGSGGSGGSGGSEIQLQQTGPELVKPGASVKISCKASGYSFTDYIIFWVKQSHGKSLEWTGNINPYYGSTSY |
| | NLKFKGKATLTVDKSSSTAYMQLNSLTSEDSAVYYCVRGVYYYGSSYEAFPYWGQGTLVTVSA |
| 499 | scFv-IgAb-442 Chain2: |
| | DIQMTQSPSSLSASVGDRVTITCRASQDVNTAVAWYQQKPGKAPKLLIYSASFLYSGVPSRFSGSRSGTDFTLTISSLQPEDFA |
| | TYYCQQHYTTPPTFGQGTKVEIKRTVAAPSVFIFPPSDEQLKSGTASVVCLLNNFYPREAKVQWKVDNALQSGNSQESVTEQDS |
| | KDSTYSLSSTLTLSKADYEKHKVYACEVTHQGLSSPVTKSFNRGEC |
| 500 | AIG-1scDb-1scFv-5 Chain1: |
| | EVQLVESGGGLVQPGGSLRLSCAASGFNIKDTYIHWVRQAPGKGLEWVARIYPTNGYTRYADSVKGRFTISADTSKNTAYLQMN |
| | SLRAEDTAVYYCSRWGGDGFYAMDYWGQGTLVTVSSASTKGPSVFPLAPSSKSTSGGTAALGCLVKDYFPEPVTVSWNSGALTS |
| | GVHTFPAVLQSSGLYSLSSVVTVPSSSLGTQTYICNVNHKPSNTKVDKKVEPKSCDKTHTCPPCPAPEFEGGPSVFLFPPKPKD |
| | TLMISRTPEVTCVVVAVSHEDPEVKFNWYVDGVEVHNAKTKPREEQYNSTYRVVSVLTVLHQDWLNGKEYKCKVSNKALPAPIE |
| | KTISKAKGQPREPQVYTLPPSREEMTKNQVSLSCAVKGFYPSDIAVEWESNGQPENNYKTTPPVLDSDGSFFLVSKLTVDKSRW |
| | QQGNVFSCSVMHEALHNHYTQKSLSLSPGGGGGSGGGGSGGGGSGGGGSGGGGSGGGGSAIQLTQSPSSLSASVGDRVTITCRA |
| | SQGISSALAWYQQKPGKAPKLLIYGASSLEGGVPSRFSGSGSGTDFTLTISSLQPEDFATYYCQQFNSYPFTFGPGTKVDIKGG |
| | SGGSGGSGGSGGSGGSGGSQVQLVESGGGVVQPGRSLRLSCAASGFTFSSYVLHWVRQAPGKGLDWVAVISDDGRNKYFADSVK |
| | GRFTISRDNSKNTLYLQMNSLRAEDTAVYYCVREGYSGSWFDYWGQGTLVTVSS |
| 501 | AIG-1scDb-1scFv-5 Chain2: |
| | EVQLVESGGGLVQPGGSLRLSCAASGFNIKDTYIHWVRQAPGKGLEWVARIYPTNGYTRYADSVKGRFTISADTSKNTAYLQMN |
| | SLRAEDTAVYYCSRWGGDGFYAMDYWGQGTLVTVSSASTKGPSVFPLAPSSKSTSGGTAALGCLVKDYFPEPVTVSWNSGALTS |
| | GVHTFPAVLQSSGLYSLSSVVTVPSSSLGTQTYICNVNHKPSNTKVDKKVEPKSCDKTHTCPPCPAPEFEGGPSVFLFPPKPKD |
| | TLMISRTPEVTCVVVAVSHEDPEVKFNWYVDGVEVHNAKTKPREEQYNSTYRVVSVLTVLHQDWLNGKEYKCKVSNKALPAPIE |
| | KTISKAKGQPREPQVYTLPPSREEMTKNQVSLWCLVKGFYPSDIAVEWESNGQPENNYKTTPPVLDSDGSFFLYSKLTVDKSRW |
| | QQGNVFSCSVMHEALHNHYTQKSLSLSPGGGGGSGGGGSSYELTQPLSVSVALGQTARITCGGHNIGSKNVHWYQQKPGQAPVL |
| | VIYQDNKRPSGIPERFSGSNSGNTATLTISRAQAGDEADYYCQVWDNYNVLFGCGTKLTVLGGSGGSQVQLVQSGAEVKKPGAS |
| | VKVSCKASGYTFTSYYMHWVRQAPGQCLEWMGAIEPTYGSTSYAQKFQGRVTMTRDTSTSTVYMELSSLRSEDTAVYYCARGSA |
| | YYYDFADYWGQGTLVTVSSGGSGGSGGSGGSGGSGGSSYELTQPLSVSVALGQTARITCGGHNIGSKNVHWYQQKPGQAPVLVI |
| | YQDNKRPSGIPERFSGSNSGNTATLTISRAQAGDEADYYCQVWDNYNVLFGCGTKLTVLGGSGGSQVQLVQSGAEVKKPGASVK |
| | VSCKASGYTFTSYYMHWVRQAPGQCLEWMGAIEPTYGSTSYAQKFQGRVTMTRDTSTSTVYMELSSLRSEDTAVYYCARGSAYY |
| | YDFADYWGQGTLVTVSS |
| 502 | AIG-1scDb-1scFv-5 Chain3: |
| | DIQMTQSPSSLSASVGDRVTITCRASQDVNTAVAWYQQKPGKAPKLLIYSASFLYSGVPSRFSGSRSGTDFTLTISSLQPEDFA |
| | TYYCQQHYTTPPTFGQGTKVEIKRTVAAPSVFIFPPSDEQLKSGTASVVCLLNNFYPREAKVQWKVDNALQSGNSQESVTEQDS |
| | KDSTYSLSSTLTLSKADYEKHKVYACEVTHQGLSSPVTKSFNRGEC |

The application's sequence listing, which the Patent Office published only in electronic form, follows.

SEQUENCE LISTING (502 sequences)

SEQ ID NO: 1 - protein, 120 aa, Artificial Sequence
  antibody variable domain
QVQLVQSGAEVKKPGASVKVSCKASGYTFTSYYMHWVRQAPGQCLEWMGAIEPTYGSTSYAQKFQGRVTMTRDTSTSTVYMELSSLRSEDTAVYYCARGSAYYYDFADYWGQGTLVTVSS

SEQ ID NO: 2 - protein, 120 aa, Artificial Sequence
  antibody variable domain
EVQLVQSGAEVKKPGASVKVSCKASGYTFTNYYMQWVRQAPGQCLEWMGIINPSGGVTSYAQKFQGRVTMTRDTSTSTVYMELSSLRSEDTAVYYCARGSAYYYDFADYWGQGTLVTVSS

SEQ ID NO: 3 - protein, 120 aa, Artificial Sequence
  antibody variable domain
QVQLVQSGAEVKKPGASVKVSCKASGYTFTNYYMQWVRQAPGQGLEWMGIINPSGGVTSYAQKFQGRVTMTRDTSTSTVYMELSSLRSEDTAVYYCARGSAYYYDFADYWGQGTLVTVSS

SEQ ID NO: 4 - protein, 120 aa, Artificial Sequence
  antibody variable domain
QVQLVQSGAEVKKPGASVKVSCKASGYTFTNYYMQWVRQAPGQCLEWMGIINPSGGVTSYAQKFQGRVTMTRDTSTSTVYMELSSLRSEDTAVYYCARGSAYYYDFADYWGQGTLVTVSS

SEQ ID NO: 5 - protein, 106 aa, Artificial Sequence
  antibody variable domain
SYELTQPLSVSVALGQTARITCGGHNIGSKNVHWYQQKPGQAPVLVIYQDNKRPSGIPERFSGSNSGNTATLTISRAQAGDEADYYCQVWDNYNVLFGCGTKLTVL

SEQ ID NO: 6 - protein, 106 aa, Artificial Sequence
  antibody variable domain
SYELTQPLSVSVALGQTARITCGGNNIGSKSVHWYQQKPGQAPVLVIYQDKKRPSGIPERFSGSNSGNTATLTISRAQAGDEADYYCQVWDDYIVLFGGGTKLTVL

SEQ ID NO: 7 - protein, 106 aa, Artificial Sequence
  antibody variable domain
SYELTQPLSVSVALGQTARITCGGNNIGSKSVHWYQQKPGQAPVLVIYQDKKRPSGIPERFSGSNSGNTATLTISRAQAGDEADYYCQVWDDYIVLFGCGTKLTVL

SEQ ID NO: 8 - protein, 118 aa, Artificial Sequence
  antibody variable domain
QVTLKESGPGILQPSQTLSLTCSFSGFSLRTSGMGVGWIRQPSGKGLEWLAHIWWDDDKRYNPALKSRLTISKDTSSNQVFLKIASVDTADTATYYCAQINPAWFAYWGQGTLVTVSA

SEQ ID NO: 9 - protein, 111 aa, Artificial Sequence
  antibody variable domain
DIVLTQSPASLAVSLGQRATISCKASQSVDFDGDSFMNWYQQKPGQPPKLLIYTTSNLESGIPARFSASGSGTDFTLNIHPVEEEDTATYYCQQSNEDPYTFGGGTKLELK

SEQ ID NO: 10 - protein, 120 aa, Artificial Sequence
  antibody variable domain
QVQLQESGPGLVKPSETLSLTCTVSGGSVSSGSYYWSWIRQPPGKGLEWIGYIYYSGSTNYNPSLKSRVTISVDTSKNQFSLKLSSVTAADTAVYYCARNPISIPAFDIWGQGTMVTVSS

SEQ ID NO: 11 - protein, 120 aa, Artificial Sequence
  antibody variable domain
EVQLQESGPGLVKPSETLSLTCTVSGGSVSSGSYYWSWIRQPPGKGLEWIGYIYYSGSTNYNPSLKSRVTISVDTSKNQFSLKLSSVTAADTAVYYCARNPISIPAFDIWGQGTMVTVSS

SEQ ID NO: 12 - protein, 108 aa, Artificial Sequence
  antibody variable domain
QPVLTQPPSVSVAPGKTARITCGGNNIGSKSVHWYQQKPGQAPVLVIYYDSDRPSGIPERFSGSNSGNTATLTISRVEAGDEADYYCQVWDTSSDHVLFGGGTKLTVL

SEQ ID NO: 13 - protein, 121 aa, Artificial Sequence
  antibody variable domain
EVQLVESGGGLVKPGGSLKLSCAASGYTFTSYVMHWVRQAPGKGLEWIGYINPYNDGTKYNEKFQGRVTISSDKSISTAYMELSSLRSEDTAMYYCARGTYYYGTRVFDYWGQGTLVTVSS

SEQ ID NO: 14 - protein, 112 aa, Artificial Sequence
  antibody variable domain
DIVMTQSPATLSLSPGERATLSCRSSKSLQNVNGNTYLYWFQQKPGQSPQLLIYRMSNLNSGVPDRFSGSGSGTEFTLTISSLEPEDFAVYYCMQHLEYPITFGAGTKLEIK

SEQ ID NO: 15 - protein, 121 aa, Artificial Sequence
  antibody variable domain
QVQLVESGGGLVKPGGSLRLSCAASGFTFSSYGMHWVRQAPGKGLEWVAFIRYDGSNKYYADSVKGRFTISRDNSKNTLYLQMNSLRAEDTAVYYCAKDRGLGDGTYFDYWGQGTTVTVSS

SEQ ID NO: 16 - protein, 121 aa, Artificial Sequence
  antibody variable domain
EVQLVESGGGLVKPGGSLRLSCAASGFTFSSYGMHWVRQAPGKGLEWVAFIRYDGSNKYYADSVKGRFTISRDNSKNTLYLQMNSLRAEDTAVYYCAKDRGLGDGTYFDYWGQGTTVTVSS

SEQ ID NO: 17 - protein, 110 aa, Artificial Sequence
  antibody variable domain
QSALTQPASVSGSPGQSITISCSGSSSNIGNNAVNWYQQLPGKAPKLLIYYDDLLPSGVSDRFSGSKSGTSAFLAISGLQSEDEADYYCAAWDDSLNGPVFGGGTKLTVL

SEQ ID NO: 18 - protein, 117 aa, Artificial Sequence
  antibody variable domain
QVQLQQWGAGLLKPSETLSLTCAVYGGSFSGYYWSWIRQPPGKGLEWIGEIDHSGSTNYNPSLKSRVTISVDTSKNQFSLKLSSVTAADTAVYYCARARGPWSFDPWGQGTLVTVSS

SEQ ID NO: 19 - protein, 117 aa, Artificial Sequence
  antibody variable domain
EVQLQQWGAGLLKPSETLSLTCAVYGGSFSGYYWSWIRQPPGKGLEWIGEIDHSGSTNYNPSLKSRVTISVDTSKNQFSLKLSSVTAADTAVYYCARARGPWSFDPWGQGTLVTVSS

SEQ ID NO: 20 - protein, 106 aa, Artificial Sequence
  antibody variable domain
DIQMTQSPSTLSASVGDRVTITCRASQSISSWLAWYQQKPGKAPKLLIYKASSLESGVPSRFSGSGSGTEFTLTISSLQPDDFATYYCQQYNSYPTFGGGTKVEIK

SEQ ID NO: 21 - protein, 120 aa, Artificial Sequence
  antibody variable domain
QVQLQQSGPELVKPGASVKMSCKASGYTFTDYVINWGKQRSGQGLEWIGEIYPGSGTNYYNEKFKAKATLTADKSSNIAYMQLSSLTSEDSAVYFCARRGRYGLYAMDYWGQGTSVTVSS

SEQ ID NO: 22 - protein, 120 aa, Artificial Sequence
  antibody variable domain
EVQLQQSGPELVKPGASVKMSCKASGYTFTDYVINWGKQRSGQGLEWIGEIYPGSGTNYYNEKFKAKATLTADKSSNIAYMQLSSLTSEDSAVYFCARRGRYGLYAMDYWGQGTSVTVSS

SEQ ID NO: 23 - protein, 107 aa, Artificial Sequence
  antibody variable domain
DIQMTQTTSSLSASLGDRVTISCRASQDISNYLNWYQQKPDGTVKLLIYYTSRLHSGVPSRFSGSGSGTDYSLTINNLEQEDIATYFCQQGNTRPWTFGGGTKLEIK

SEQ ID NO: 24 - protein, 116 aa, Artificial Sequence
  antibody variable domain
EVQLQQSGPELVKPGASVKISCKTSGYTFTEYTMHWVKQSHGKSLEWIGGISPNIGGTSYNQKFKGKATLTVDKSSSTAYMELRSLTSEDSAVYYCARRGGSFDYWGQGTTLTVSS

SEQ ID NO: 25 - protein, 107 aa, Artificial Sequence
  antibody variable domain
DIVMTQSPATLSVTPGDRVSLSCRASQSISDYLHWYQQKSHESPRLLIKYASQSISGIPSRFSGSGSGSDFTLSINSVEPEDVGVYYCQNGHSFPLTFGAGTKLELK

SEQ ID NO: 26 - protein, 5 aa, Artificial Sequence
  antibody CDR sequence
SYYMH

SEQ ID NO: 27 - protein, 17 aa, Artificial Sequence
  antibody CDR sequence
AIEPTYGSTSYAQKFQG

SEQ ID NO: 28 - protein, 11 aa, Artificial Sequence
  antibody CDR sequence
GSAYYYDFADY

SEQ ID NO: 29 - protein, 11 aa, Artificial Sequence
  antibody CDR sequence
GGHNIGSKNVH

SEQ ID NO: 30 - protein, 7 aa, Artificial Sequence
  antibody CDR sequence
QDNKRPS

SEQ ID NO: 31 - protein, 9 aa, Artificial Sequence
  antibody CDR sequence
QVWDNYNVL

SEQ ID NO: 32 - protein, 5 aa, Artificial Sequence
  antibody CDR sequence
NYYMQ

SEQ ID NO: 33 - protein, 17 aa, Artificial Sequence
  antibody CDR sequence
IINPSGGVTSYAQKFQG

SEQ ID NO: 34 - protein, 11 aa, Artificial Sequence
  antibody CDR sequence
GSAYYYDFADY

SEQ ID NO: 35 - protein, 11 aa, Artificial Sequence
  antibody CDR sequence
GGNNIGSKSVH

SEQ ID NO: 36 - protein, 7 aa, Artificial Sequence
  antibody CDR sequence
QDKKRPS

SEQ ID NO: 37 - protein, 9 aa, Artificial Sequence
  antibody CDR sequence
QVWDDYIVL

SEQ ID NO: 38 - protein, 7 aa, Artificial Sequence
  antibody CDR sequence
TSGMGVG

SEQ ID NO: 39 - protein, 16 aa, Artificial Sequence
  antibody CDR sequence
HIWWDDDKRYNPALKS

SEQ ID NO: 40 - protein, 8 aa, Artificial Sequence
  antibody CDR sequence
INPAWFAY

SEQ ID NO: 41 - protein, 15 aa, Artificial Sequence
  antibody CDR sequence
KASQSVDFDGDSFMN

SEQ ID NO: 42 - protein, 7 aa, Artificial Sequence
  antibody CDR sequence
TTSNLES

SEQ ID NO: 43 - protein, 9 aa, Artificial Sequence
  antibody CDR sequence
QQSNEDPYT

SEQ ID NO: 44 - protein, 7 aa, Artificial Sequence
  antibody CDR sequence
SGSYYWS

SEQ ID NO: 45 - protein, 16 aa, Artificial Sequence
  antibody CDR sequence
YIYYSGSTNYNPSLKS

SEQ ID NO: 46 - protein, 10 aa, Artificial Sequence
  antibody CDR sequence
NPISIPAFDI

SEQ ID NO: 47 - protein, 11 aa, Artificial Sequence
  antibody CDR sequence
GGNNIGSKSVH

SEQ ID NO: 48 - protein, 7 aa, Artificial Sequence
  antibody CDR sequence
YDSDRPS

SEQ ID NO: 49 - protein, 11 aa, Artificial Sequence
  antibody CDR sequence
QVWDTSSDHVL

SEQ ID NO: 50 - protein, 5 aa, Artificial Sequence
  antibody CDR sequence
SYVMH

SEQ ID NO: 51 - protein, 17 aa, Artificial Sequence
  antibody CDR sequence
YINPYNDGTKYNEKFQG

SEQ ID NO: 52 - protein, 12 aa, Artificial Sequence
  antibody CDR sequence
GTYYYGTRVFDY

SEQ ID NO: 53 - protein, 16 aa, Artificial Sequence
  antibody CDR sequence
RSSKSLQNVNGNTYLY

SEQ ID NO: 54 - protein, 7 aa, Artificial Sequence
  antibody CDR sequence
RMSNLNS

SEQ ID NO: 55 - protein, 9 aa, Artificial Sequence
  antibody CDR sequence
MQHLEYPIT

SEQ ID NO: 56 - protein, 5 aa, Artificial Sequence
  antibody CDR sequence
SYGMH

SEQ ID NO: 57 - protein, 17 aa, Artificial Sequence
  antibody CDR sequence
FIRYDGSNKYYADSVKG

SEQ ID NO: 58 - protein, 12 aa, Artificial Sequence
  antibody CDR sequence
DRGLGDGTYFDY

SEQ ID NO: 59 - protein, 13 aa, Artificial Sequence
  antibody CDR sequence
SGSSSNIGNNAVN

SEQ ID NO: 60 - protein, 7 aa, Artificial Sequence
  antibody CDR sequence
YDDLLPS

SEQ ID NO: 61 - protein, 11 aa, Artificial Sequence
  antibody CDR sequence
AAWDDSLNGPV

SEQ ID NO: 62 - protein, 5 aa, Artificial Sequence
  antibody CDR sequence
GYYWS

SEQ ID NO: 63 - protein, 16 aa, Artificial Sequence
  antibody CDR sequence
EIDHSGSTNYNPSLKS

SEQ ID NO: 64 - protein, 9 aa, Artificial Sequence
  antibody CDR sequence
ARGPWSFDP

SEQ ID NO: 65 - protein, 11 aa, Artificial Sequence
  antibody CDR sequence
RASQSISSWLA

SEQ ID NO: 66 - protein, 7 aa, Artificial Sequence
  antibody CDR sequence
KASSLES

SEQ ID NO: 67 - protein, 8 aa, Artificial Sequence
  antibody CDR sequence
QQYNSYPT

SEQ ID NO: 68 - protein, 5 aa, Artificial Sequence
  antibody CDR sequence
DYVIN

SEQ ID NO: 69 - protein, 17 aa, Artificial Sequence
  antibody CDR sequence
EIYPGSGTNYYNEKFKA

SEQ ID NO: 70 - protein, 11 aa, Artificial Sequence
  antibody CDR sequence
RGRYGLYAMDY

SEQ ID NO: 71 - protein, 11 aa, Artificial Sequence
  antibody CDR sequence
RASQDISNYLN

SEQ ID NO: 72 - protein, 7 aa, Artificial Sequence
  antibody CDR sequence
YTSRLHS

SEQ ID NO: 73 - protein, 9 aa, Artificial Sequence
  antibody CDR sequence
QQGNTRPWT

SEQ ID NO: 74 - protein, 5 aa, Artificial Sequence
  antibody CDR sequence
EYTMH

SEQ ID NO: 75 - protein, 17 aa, Artificial Sequence
  antibody CDR sequence
GISPNIGGTSYNQKFKG

SEQ ID NO: 76 - protein, 7 aa, Artificial Sequence
  antibody CDR sequence
RGGSFDY

SEQ ID NO: 77 - protein, 11 aa, Artificial Sequence
  antibody CDR sequence
RASQSISDYLH

SEQ ID NO: 78 - protein, 7 aa, Artificial Sequence
  antibody CDR sequence
YASQSIS

SEQ ID NO: 79 - protein, 9 aa, Artificial Sequence
  antibody CDR sequence
QNGHSFPLT

SEQ ID NO: 80 - protein, 6 aa, Artificial Sequence
  linker
GGSGGS

SEQ ID NO: 81 - protein, 9 aa, Artificial Sequence
  linker
GGSGGSGGS

SEQ ID NO: 82 - protein, 18 aa, Artificial Sequence
  linker
GGSGGSGGSGGSGGSGGS

SEQ ID NO: 83 - protein, 21 aa, Artificial Sequence
  linker
GGSGGSGGSGGSGGSGGSGGS

SEQ ID NO: 84 - protein, 5 aa, Artificial Sequence
  connector
GGGGS

SEQ ID NO: 85 - protein, 10 aa, Artificial Sequence
  connector
GGGGSGGGGS

SEQ ID NO: 86 - protein, 20 aa, Artificial Sequence
  connector
GGGGSGGGGSGGGGSGGGGS

SEQ ID NO: 87 - protein, 30 aa, Artificial Sequence
  connector
GGGGSGGGGSGGGGSGGGGSGGGGSGGGGS

SEQ ID NO: 88 - protein, 15 aa, human
EPKSCDKTHTCPPCP

SEQ ID NO: 89 - protein, 10 aa, human
EPKSCDKTHT

SEQ ID NO: 90 - protein, 10 aa, human
DKTHTCPPCP

SEQ ID NO: 91 - protein, 329 aa, human
ASTKGPSVFPLAPSSKSTSGGTAALGCLVKDYFPEPVTVSWNSGALTSGVHTFPAVLQSSGLYSLSSVVTVPSSSLGTQTYICNVNHKPSNTKVDKKVEPKSCDKTHTCPPCPAPELLGGPSVFLFPPKPKDTLMISRTPEVTCVVVDVSHEDPEVKFNWYVDGVEVHNAKTKPREEQYNSTYRVVSVLTVLHQDWLNGKEYKCKVSNKALPAPIEKTISKAKGQPREPQVYTLPPSREEMTKNQVSLTCLVKGFYPSDIAVEWESNGQPENNYKTTPPVLDSDGSFFLYSKLTVDKSRWQQGNVFSCSVMHEALHNHYTQKSLSLSPG

SEQ ID NO: 92 - protein, 329 aa, Artificial Sequence
  artificial antibody construct
ASTKGPSVFPLAPSSKSTSGGTAALGCLVKDYFPEPVTVSWNSGALTSGVHTFPAVLQSSGLYSLSSVVTVPSSSLGTQTYICNVNHKPSNTKVDKKVEPKSCDKTHTCPPCPAPEFEGGPSVFLFPPKPKDTLMISRTPEVTCVVVAVSHEDPEVKFNWYVDGVEVHNAKTKPREEQYGSTYRVVSVLTVLHQDWLNGKEYKCKVSNKALPAPIEKTISKAKGQPREPQVYTLPPSREEMTKNQVSLTCLVKGFYPSDIAVEWESNGQPENNYKTTPPVLDSDGSFFLYSKLTVDKSRWQQGNVFSCSVMHEALHNHYTQKSLSLSPG

SEQ ID NO: 93 - protein, 329 aa, Artificial Sequence
  artificial antibody construct
ASTKGPSVFPLAPSSKSTSGGTAALGCLVKDYFPEPVTVSWNSGALTSGVHTFPAVLQSSGLYSLSSVVTVPSSSLGTQTYICNVNHKPSNTKVDKKVEPKSCDKTHTCPPCPAPELLGGPDVFLFPPKPKDTLMISRTPEVTCVVVDVSHEDPEVKFNWYVDGVEVHNAKTKPREEQYNSTYRVVSVLTVLHQDWLNGKEYKCKVSNKALPAPEEKTISKAKGQPREPQVYTLPPSREEMTKNQVSLTCLVKGFYPSDIAVEWESNGQPENNYKTTPPVLDSDGSFFLYSKLTVDKSRWQQGNVFSCSVMHEALHNHYTQKSLSLSPG

SEQ ID NO: 94 - protein, 106 aa, human
GQPKAAPSVTLFPPSSEELQANKATLVCLISDFYPGAVTVAWKADSSPVKAGVETTTPSKQSNNKYAASSYLSLTPEQWKSHRSYSCQVTHEGSTVEKTVAPTECS

SEQ ID NO: 95 - protein, 107 aa, human [sequence omitted]

SEQ ID NO: 96 - protein, 98 aa, human
ASTKGPSVFPLAPSSKSTSGGTAALGCLVKDYFPEPVTVSWNSGALTSGVHTFPAVLQSSGLYSLSSVVTVPSSSLGTQTYICNVNHKPSNTKVDKKV

SEQ ID NO: 97 - protein, 216 aa, human
APELLGGPSVFLFPPKPKDTLMISRTPEVTCVVVDVSHEDPEVKFNWYVDGVEVHNAKTKPREEQYNSTYRVVSVLTVLHQDWLNGKEYKCKVSNKALPAPIEKTISKAKGQPREPQVYTLPPSREEMTKNQVSLTCLVKGFYPSDIAVEWESNGQPENNYKTTPPVLDSDGSFFLYSKLTVDKSRWQQGNVFSCSVMHEALHNHYTQKSLSLSPG

SEQ ID NO: 98 - protein, 216 aa, Artificial Sequence
  artificial antibody construct
APEFEGGPSVFLFPPKPKDTLMISRTPEVTCVVVAVSHEDPEVKFNWYVDGVEVHNAKTKPREEQYGSTYRVVSVLTVLHQDWLNGKEYKCKVSNKALPAPIEKTISKAKGQPREPQVYTLPPSREEMTKNQVSLTCLVKGFYPSDIAVEWESNGQPENNYKTTPPVLDSDGSFFLYSKLTVDKSRWQQGNVFSCSVMHEALHNHYTQKSLSLSPG

SEQ ID NO: 99 - protein, 216 aa, Artificial Sequence
  artificial antibody construct
APELLGGPDVFLFPPKPKDTLMISRTPEVTCVVVDVSHEDPEVKFNWYVDGVEVHNAKTKPREEQYNSTYRVVSVLTVLHQDWLNGKEYKCKVSNKALPAPEEKTISKAKGQPREPQVYTLPPSREEMTKNQVSLTCLVKGFYPSDIAVEWESNGQPENNYKTTPPVLDSDGSFFLYSKLTVDKSRWQQGNVFSCSVMHEALHNHYTQKSLSLSPG

SEQ ID NO: 100 - protein, 216 aa, Artificial Sequence
  artificial antibody construct
APELLGGPSVFLFPPKPKDTLMISRTPEVTCVVVDVSHEDPEVKFNWYVDGVEVHNAKTKPREEQYNSTYRVVSVLTVLHQDWLNGKEYKCKVSNKALPAPIEKTISKAKGQPREPQVYTLPPSREEMTKNQVSLSCAVKGFYPSDIAVEWESNGQPENNYKTTPPVLDSDGSFFLVSKLTVDKSRWQQGNVFSCSVMHEALHNHYTQKSLSLSPG

SEQ ID NO: 101 - protein, 216 aa, Artificial Sequence
  artificial antibody construct
APELLGGPSVFLFPPKPKDTLMISRTPEVTCVVVDVSHEDPEVKFNWYVDGVEVHNAKTKPREEQYNSTYRVVSVLTVLHQDWLNGKEYKCKVSNKALPAPIEKTISKAKGQPREPQVYTLPPSREEMTKNQVSLWCLVKGFYPSDIAVEWESNGQPENNYKTTPPVLDSDGSFFLYSKLTVDKSRWQQGNVFSCSVMHEALHNHYTQKSLSLSPG

SEQ ID NO: 102 - protein, 216 aa, Artificial Sequence
  artificial antibody construct
APEFEGGPSVFLFPPKPKDTLMISRTPEVTCVVVAVSHEDPEVKFNWYVDGVEVHNAKTKPREEQYGSTYRVVSVLTVLHQDWLNGKEYKCKVSNKALPAPIEKTISKAKGQPREPQVYTLPPSREEMTKNQVSLSCAVKGFYPSDIAVEWESNGQPENNYKTTPPVLDSDGSFFLVSKLTVDKSRWQQGNVFSCSVMHEALHNHYTQKSLSLSPG

SEQ ID NO: 103 - protein, 216 aa, Artificial Sequence
  artificial antibody construct
APEFEGGPSVFLFPPKPKDTLMISRTPEVTCVVVAVSHEDPEVKFNWYVDGVEVHNAKTKPREEQYGSTYRVVSVLTVLHQDWLNGKEYKCKVSNKALPAPIEKTISKAKGQPREPQVYTLPPSREEMTKNQVSLWCLVKGFYPSDIAVEWESNGQPENNYKTTPPVLDSDGSFFLYSKLTVDKSRWQQGNVFSCSVMHEALHNHYTQKSLSLSPG

SEQ ID NO: 104 - protein, 216 aa, Artificial Sequence
  artificial antibody construct
APELLGGPDVFLFPPKPKDTLMISRTPEVTCVVVDVSHEDPEVKFNWYVDGVEVHNAKTKPREEQYNSTYRVVSVLTVLHQDWLNGKEYKCKVSNKALPAPEEKTISKAKGQPREPQVYTLPPSREEMTKNQVSLSCAVKGFYPSDIAVEWESNGQPENNYKTTPPVLDSDGSFFLVSKLTVDKSRWQQGNVFSCSVMHEALHNHYTQKSLSLSPG

SEQ ID NO: 105 - protein, 216 aa, Artificial Sequence
  artificial antibody construct
APELLGGPDVFLFPPKPKDTLMISRTPEVTCVVVDVSHEDPEVKFNWYVDGVEVHNAKTKPREEQYNSTYRVVSVLTVLHQDWLNGKEYKCKVSNKALPAPEEKTISKAKGQPREPQVYTLPPSREEMTKNQVSLWCLVKGFYPSDIAVEWESNGQPENNYKTTPPVLDSDGSFFLYSKLTVDKSRWQQGNVFSCSVMHEALHNHYTQKSLSLSPG

SEQ ID NO: 106 - protein, 474 aa, Artificial Sequence
  artificial antibody construct
APELLGGPSVFLFPPKPKDTLMISRTPEVTCVVVDVSHEDPEVKFNWYVDGVEVHNAKTKPCEEQYNSTYRCVSVLTVLHQDWLNGKEYKCKVSNKALPAPIEKTISKAKGQPREPQVYTLPPSREEMTKNQVSLTCLVKGFYPSDIAVEWESNGQPENNYKTTPPVLDSDGSFFLYSKLTVDKSRWQQGNVFSCSVMHEALHNHYTQKSLSLSPGKGGGGSGGGGSGGGGSGGGGSGGGGSGGGGSDKTHTCPPCPAPELLGGPSVFLFPPKPKDTLMISRTPEVTCVVVDVSHEDPEVKFNWYVDGVEVHNAKTKPCEEQYNSTYRCVSVLTVLHQDWLNGKEYKCKVSNKALPAPIEKTISKAKGQPREPQVYTLPPSREEMTKNQVSLTCLVKGFYPSDIAVEWESNGQPENNYKTTPPVLDSDGSFFLYSKLTVDKSRWQQGNVFSCSVMHEALHNHYTQKSLSLSPGK

SEQ ID NO: 107 - protein, 474 aa, Artificial Sequence
  artificial antibody construct
APEFEGGPSVFLFPPKPKDTLMISRTPEVTCVVVAVSHEDPEVKFNWYVDGVEVHNAKTKPCEEQYGSTYRCVSVLTVLHQDWLNGKEYKCKVSNKALPAPIEKTISKAKGQPREPQVYTLPPSREEMTKNQVSLTCLVKGFYPSDIAVEWESNGQPENNYKTTPPVLDSDGSFFLYSKLTVDKSRWQQGNVFSCSVMHEALHNHYTQKSLSLSPGKGGGGSGGGGSGGGGSGGGGSGGGGSGGGGSDKTHTCPPCPAPEFEGGPSVFLFPPKPKDTLMISRTPEVTCVVVAVSHEDPEVKFNWYVDGVEVHNAKTKPCEEQYGSTYRCVSVLTVLHQDWLNGKEYKCKVSNKALPAPIEKTISKAKGQPREPQVYTLPPSREEMTKNQVSLTCLVKGFYPSDIAVEWESNGQPENNYKTTPPVLDSDGSFFLYSKLTVDKSRWQQGNVFSCSVMHEALHNHYTQKSLSLSPGK

SEQ ID NO: 108 - protein, 498 aa, Artificial Sequence
  artificial antibody construct
EVQLVQSGAEVKKPGASVKVSCKASGYTFTNYYMQWVRQAPGQCLEWMGIINPSGGVTSYAQKFQGRVTMTRDTSTSTVYMELSSLRSEDTAVYYCARGSAYYYDFADYWGQGTLVTVSSGGSGGSGGSDIVMTQSPATLSLSPGERATLSCRSSKSLQNVNGNTYLYWFQQKPGQSPQLLIYRMSNLNSGVPDRFSGSGSGTEFTLTISSLEPEDFAVYYCMQHLEYPITFGAGTKLEIKGGSGGSGGSGGSGGSGGSGGSEVQLVESGGGLVKPGGSLKLSCAASGYTFTSYVMHWVRQAPGKGLEWIGYINPYNDGTKYNEKFQGRVTISSDKSISTAYMELSSLRSEDTAMYYCARGTYYYGTRVFDYWGQGTLVTVSSGGSGGSGGSSYELTQPLSVSVALGQTARITCGGNNIGSKSVHWYQQKPGQAPVLVIYQDKKRPSGIPERFSGSNSGNTATLTISRAQAGDEADYYCQVWDDYIVLFGCGTKLTVL

SEQ ID NO: 109 - protein, 493 aa, Artificial Sequence
  artificial antibody construct
EVQLVQSGAEVKKPGASVKVSCKASGYTFTNYYMQWVRQAPGQCLEWMGIINPSGGVTSYAQKFQGRVTMTRDTSTSTVYMELSSLRSEDTAVYYCARGSAYYYDFADYWGQGTLVTVSSGGSGGSGGSQPVLTQPPSVSVAPGKTARITCGGNNIGSKSVHWYQQKPGQAPVLVIYYDSDRPSGIPERFSGSNSGNTATLTISRVEAGDEADYYCQVWDTSSDHVLFGGGTKLTVLGGSGGSGGSGGSGGSGGSGGSQVQLQESGPGLVKPSETLSLTCTVSGGSVSSGSYYWSWIRQPPGKGLEWIGYIYYSGSTNYNPSLKSRVTISVDTSKNQFSLKLSSVTAADTAVYYCARNPISIPAFDIWGQGTMVTVSSGGSGGSGGSSYELTQPLSVSVALGQTARITCGGNNIGSKSVHWYQQKPGQAPVLVIYQDKKRPSGIPERFSGSNSGNTATLTISRAQAGDEADYYCQVWDDYIVLFGCGTKLTVL

SEQ ID NO: 110 - protein, 503 aa, Artificial Sequence
  artificial antibody construct
EVQLVESGGGLVKPGGSLRLSCAASGFTFSSYGMHWVRQAPGKGLEWVAFIRYDGSNKYYADSVKGRFTISRDNSKNTLYLQMNSLRAEDTAVYYCAKDRGLGDGTYFDYWGQGTTVTVSSGGSGGSGGSDIVMTQSPATLSLSPGERATLSCRSSKSLQNVNGNTYLYWFQQKPGQSPQLLIYRMSNLNSGVPDRFSGSGSGTEFTLTISSLEPEDFAVYYCMQHLEYPITFGAGTKLEIKGGSGGSGGSGGSGGSGGSGGSEVQLVESGGGLVKPGGSLKLSCAASGYTFTSYVMHWVRQAPGKGLEWIGYINPYNDGTKYNEKFQGRVTISSDKSISTAYMELSSLRSEDTAMYYCARGTYYYGTRVFDYWGQGTLVTVSSGGSGGSGGSQSALTQPASVSGSPGQSITISCSGSSSNIGNNAVNWYQQLPGKAPKLLIYYDDLLPSGVSDRFSGSKSGTSAFLAISGLQSEDEADYYCAAWDDSLNGPVFGGGTKLTVL

SEQ ID NO: 111 - protein, 495 aa, Artificial Sequence
  artificial antibody construct
EVQLQQWGAGLLKPSETLSLTCAVYGGSFSGYYWSWIRQPPGKGLEWIGEIDHSGSTNYNPSLKSRVTISVDTSKNQFSLKLSSVTAADTAVYYCARARGPWSFDPWGQGTLVTVSSGGSGGSGGSDIVMTQSPATLSLSPGERATLSCRSSKSLQNVNGNTYLYWFQQKPGQSPQLLIYRMSNLNSGVPDRFSGSGSGTEFTLTISSLEPEDFAVYYCMQHLEYPITFGAGTKLEIKGGSGGSGGSGGSGGSGGSGGSEVQLVESGGGLVKPGGSLKLSCAASGYTFTSYVMHWVRQAPGKGLEWIGYINPYNDGTKYNEKFQGRVTISSDKSISTAYMELSSLRSEDTAMYYCARGTYYYGTRVFDYWGQGTLVTVSSGGSGGSGGSDIQMTQSPSTLSASVGDRVTITCRASQSISSWLAWYQQKPGKAPKLLIYKASSLESGVPSRFSGSGSGTEFTLTISSLQPDDFATYYCQQYNSYPTFGGGTKVEIK

SEQ ID NO: 112 - protein, 499 aa, Artificial Sequence
  artificial antibody construct
EVQLQQSGPELVKPGASVKMSCKASGYTFTDYVINWGKQRSGQGLEWIGEIYPGSGTNYYNEKFKAKATLTADKSSNIAYMQLSSLTSEDSAVYFCARRGRYGLYAMDYWGQGTSVTVSSGGSGGSGGSDIVMTQSPATLSLSPGERATLSCRSSKSLQNVNGNTYLYWFQQKPGQSPQLLIYRMSNLNSGVPDRFSGSGSGTEFTLTISSLEPEDFAVYYCMQHLEYPITFGAGTKLEIKGGSGGSGGSGGSGGSGGSGGSEVQLVESGGGLVKPGGSLKLSCAASGYTFTSYVMHWVRQAPGKGLEWIGYINPYNDGTKYNEKFQGRVTISSDKSISTAYMELSSLRSEDTAMYYCARGTYYYGTRVFDYWGQGTLVTVSSGGSGGSGGSDIQMTQTTSSLSASLGDRVTISCRASQDISNYLNWYQQKPDGTVKLLIYYTSRLHSGVPSRFSGSGSGTDYSLTINNLEQEDIATYFCQQGNTRPWTFGGGTKLEIK

SEQ ID NO: 113 - protein, 495 aa, Artificial Sequence
  artificial antibody construct
EVQLQQSGPELVKPGASVKISCKTSGYTFTEYTMHWVKQSHGKSLEWIGGISPNIGGTSYNQKFKGKATLTVDKSSSTAYMELRSLTSEDSAVYYCARRGGSFDYWGQGTTLTVSSGGSGGSGGSDIVMTQSPATLSLSPGERATLSCRSSKSLQNVNGNTYLYWFQQKPGQSPQLLIYRMSNLNSGVPDRFSGSGSGTEFTLTISSLEPEDFAVYYCMQHLEYPITFGAGTKLEIKGGSGGSGGSGGSGGSGGSGGSEVQLVESGGGLVKPGGSLKLSCAASGYTFTSYVMHWVRQAPGKGLEWIGYINPYNDGTKYNEKFQGRVTISSDKSISTAYMELSSLRSEDTAMYYCARGTYYYGTRVFDYWGQGTLVTVSSGGSGGSGGSDIVMTQSPATLSVTPGDRVSLSCRASQSISDYLHWYQQKSHESPRLLIKYASQSISGIPSRFSGSGSGSDFTLSINSVEPEDVGVYYCQNGHSFPLTFGAGTKLELK

SEQ ID NO: 114 - protein, 498 aa, Artificial Sequence
  artificial antibody construct
EVQLVESGGGLVKPGGSLRLSCAASGFTFSSYGMHWVRQAPGKGLEWVAFIRYDGSNKYYADSVKGRFTISRDNSKNTLYLQMNSLRAEDTAVYYCAKDRGLGDGTYFDYWGQGTTVTVSSGGSGGSGGSQPVLTQPPSVSVAPGKTARITCGGNNIGSKSVHWYQQKPGQAPVLVIYYDSDRPSGIPERFSGSNSGNTATLTISRVEAGDEADYYCQVWDTSSDHVLFGGGTKLTVLGGSGGSGGSGGSGGSGGSGGSQVQLQESGPGLVKPSETLSLTCTVSGGSVSSGSYYWSWIRQPPGKGLEWIGYIYYSGSTNYNPSLKSRVTISVDTSKNQFSLKLSSVTAADTAVYYCARNPISIPAFDIWGQGTMVTVSSGGSGGSGGSQSALTQPASVSGSPGQSITISCSGSSSNIGNNAVNWYQQLPGKAPKLLIYYDDLLPSGVSDRFSGSKSGTSAFLAISGLQSEDEADYYCAAWDDSLNGPVFGGGTKLTVL

SEQ ID NO: 115 - protein, 490 aa, Artificial Sequence
  artificial antibody construct
EVQLQQWGAGLLKPSETLSLTCAVYGGSFSGYYWSWIRQPPGKGLEWIGEIDHSGSTNYNPSLKSRVTISVDTSKNQFSLKLSSVTAADTAVYYCARARGPWSFDPWGQGTLVTVSSGGSGGSGGSQPVLTQPPSVSVAPGKTARITCGGNNIGSKSVHWYQQKPGQAPVLVIYYDSDRPSGIPERFSGSNSGNTATLTISRVEAGDEADYYCQVWDTSSDHVLFGGGTKLTVLGGSGGSGGSGGSGGSGGSGGSQVQLQESGPGLVKPSETLSLTCTVSGGSVSSGSYYWSWIRQPPGKGLEWIGYIYYSGSTNYNPSLKSRVTISVDTSKNQFSLKLSSVTAADTAVYYCARNPISIPAFDIWGQGTMVTVSSGGSGGSGGSDIQMTQSPSTLSASVGDRVTITCRASQSISSWLAWYQQKPGKAPKLLIYKASSLESGVPSRFSGSGSGTEFTLTISSLQPDDFATYYCQQYNSYPTFGGGTKVEIK

SEQ ID NO: 116 - protein, 494 aa, Artificial Sequence
  artificial antibody construct
EVQLQQSGPELVKPGASVKMSCKASGYTFTDYVINWGKQRSGQGLEWIGEIYPGSGTNYYNEKFKAKATLTADKSSNIAYMQLSSLTSEDSAVYFCARRGRYGLYAMDYWGQGTSVTVSSGGSGGSGGSQPVLTQPPSVSVAPGKTARITCGGNNIGSKSVHWYQQKPGQAPVLVIYYDSDRPSGIPERFSGSNSGNTATLTISRVEAGDEADYYCQVWDTSSDHVLFGGGTKLTVLGGSGGSGGSGGSGGSGGSGGSQVQLQESGPGLVKPSETLSLTCTVSGGSVSSGSYYWSWIRQPPGKGLEWIGYIYYSGSTNYNPSLKSRVTISVDTSKNQFSLKLSSVTAADTAVYYCARNPISIPAFDIWGQGTMVTVSSGGSGGSGGSDIQMTQTTSSLSASLGDRVTISCRASQDISNYLNWYQQKPDGTVKLLIYYTSRLHSGVPSRFSGSGSGTDYSLTINNLEQEDIATYFCQQGNTRPWTFGGGTKLEIK

SEQ ID NO: 117 - protein, 490 aa, Artificial Sequence
  artificial antibody construct
EVQLQQSGPELVKPGASVKISCKTSGYTFTEYTMHWVKQSHGKSLEWIGGISPNIGGTSYNQKFKGKATLTVDKSSSTAYMELRSLTSEDSAVYYCARRGGSFDYWGQGTTLTVSSGGSGGSGGSQPVLTQPPSVSVAPGKTARITCGGNNIGSKSVHWYQQKPGQAPVLVIYYDSDRPSGIPERFSGSNSGNTATLTISRVEAGDEADYYCQVWDTSSDHVLFGGGTKLTVLGGSGGSGGSGGSGGSGGSGGSQVQLQESGPGLVKPSETLSLTCTVSGGSVSSGSYYWSWIRQPPGKGLEWIGYIYYSGSTNYNPSLKSRVTISVDTSKNQFSLKLSSVTAADTAVYYCARNPISIPAFDIWGQGTMVTVSSGGSGGSGGSDIVMTQSPATLSVTPGDRVSLSCRASQSISDYLHWYQQKSHESPRLLIKYASQSISGIPSRFSGSGSGSDFTLSINSVEPEDVGVYYCQNGHSFPLTFGAGTKLELK

SEQ ID NO: 118 - protein, 487 aa, Artificial Sequence
  artificial antibody construct
SYELTQPLSVSVALGQTARITCGGNNIGSKSVHWYQQKPGQAPVLVIYQDKKRPSGIPERFSGSNSGNTATLTISRAQAGDEADYYCQVWDDYIVLFGCGTKLTVLGGSGGSQVQLVESGGGLVKPGGSLRLSCAASGFTFSSYGMHWVRQAPGKGLEWVAFIRYDGSNKYYADSVKGRFTISRDNSKNTLYLQMNSLRAEDTAVYYCAKDRGLGDGTYFDYWGQGTTVTVSSGGSGGSGGSGGSGGSGGSQSALTQPASVSGSPGQSITISCSGSSSNIGNNAVNWYQQLPGKAPKLLIYYDDLLPSGVSDRFSGSKSGTSAFLAISGLQSEDEADYYCAAWDDSLNGPVFGGGTKLTVLGGSGGSQVQLVQSGAEVKKPGASVKVSCKASGYTFTNYYMQWVRQAPGQCLEWMGIINPSGGVTSYAQKFQGRVTMTRDTSTSTVYMELSSLRSEDTAVYYCARGSAYYYDFADYWGQGTLVTVSS

SEQ ID NO: 119 - protein, 479 aa, Artificial Sequence
  artificial antibody construct
SYELTQPLSVSVALGQTARITCGGNNIGSKSVHWYQQKPGQAPVLVIYQDKKRPSGIPERFSGSNSGNTATLTISRAQAGDEADYYCQVWDDYIVLFGCGTKLTVLGGSGGSQVQLQQWGAGLLKPSETLSLTCAVYGGSFSGYYWSWIRQPPGKGLEWIGEIDHSGSTNYNPSLKSRVTISVDTSKNQFSLKLSSVTAADTAVYYCARARGPWSFDPWGQGTLVTVSSGGSGGSGGSGGSGGSGGSDIQMTQSPSTLSASVGDRVTITCRASQSISSWLAWYQQKPGKAPKLLIYKASSLESGVPSRFSGSGSGTEFTLTISSLQPDDFATYYCQQYNSYPTFGGGTKVEIKGGSGGSQVQLVQSGAEVKKPGASVKVSCKASGYTFTNYYMQWVRQAPGQCLEWMGIINPSGGVTSYAQKFQGRVTMTRDTSTSTVYMELSSLRSEDTAVYYCARGSAYYYDFADYWGQGTLVTVSS

SEQ ID NO: 120 - protein, 483 aa, Artificial Sequence
  artificial antibody construct
SYELTQPLSVSVALGQTARITCGGNNIGSKSVHWYQQKPGQAPVLVIYQDKKRPSGIPERFSGSNSGNTATLTISRAQAGDEADYYCQVWDDYIVLFGCGTKLTVLGGSGGSQVQLQQSGPELVKPGASVKMSCKASGYTFTDYVINWGKQRSGQGLEWIGEIYPGSGTNYYNEKFKAKATLTADKSSNIAYMQLSSLTSEDSAVYFCARRGRYGLYAMDYWGQGTSVTVSSGGSGGSGGSGGSGGSGGSDIQMTQTTSSLSASLGDRVTISCRASQDISNYLNWYQQKPDGTVKLLIYYTSRLHSGVPSRFSGSGSGTDYSLTINNLEQEDIATYFCQQGNTRPWTFGGGTKLEIKGGSGGSQVQLVQSGAEVKKPGASVKVSCKASGYTFTNYYMQWVRQAPGQCLEWMGIINPSGGVTSYAQKFQGRVTMTRDTSTSTVYMELSSLRSEDTAVYYCARGSAYYYDFADYWGQGTLVTVSS

SEQ ID NO: 121 - protein, 479 aa, Artificial Sequence
  artificial antibody construct
SYELTQPLSVSVALGQTARITCGGNNIGSKSVHWYQQKPGQAPVLVIYQDKKRPSGIPERFSGSNSGNTATLTISRAQAGDEADYYCQVWDDYIVLFGCGTKLTVLGGSGGSEVQLQQSGPELVKPGASVKISCKTSGYTFTEYTMHWVKQSHGKSLEWIGGISPNIGGTSYNQKFKGKATLTVDKSSSTAYMELRSLTSEDSAVYYCARRGGSFDYWGQGTTLTVSSGGSGGSGGSGGSGGSGGSDIVMTQSPATLSVTPGDRVSLSCRASQSISDYLHWYQQKSHESPRLLIKYASQSISGIPSRFSGSGSGSDFTLSINSVEPEDVGVYYCQNGHSFPLTFGAGTKLELKGGSGGSQVQLVQSGAEVKKPGASVKVSCKASGYTFTNYYMQWVRQAPGQCLEWMGIINPSGGVTSYAQKFQGRVTMTRDTSTSTVYMELSSLRSEDTAVYYCARGSAYYYDFADYWGQGTLVTVSS

SEQ ID NO: 122 - protein, 501 aa, Artificial Sequence
  artificial antibody construct
QVTLKESGPGILQPSQTLSLTCSFSGFSLRTSGMGVGWIRQPSGKGLEWLAHIWWDDDKRYNPALKSRLTISKDTSSNQVFLKIASVDTADTATYYCAQINPAWFAYWGQGTLVTVSAGGSGGSGGSDIVMTQSPATLSLSPGERATLSCRSSKSLQNVNGNTYLYWFQQKPGQSPQLLIYRMSNLNSGVPDRFSGSGSGTEFTLTISSLEPEDFAVYYCMQHLEYPITFGAGTKLEIKGGSGGSGGSGGSGGSGGSGGSEVQLVESGGGLVKPGGSLKLSCAASGYTFTSYVMHWVRQAPGKGLEWIGYINPYNDGTKYNEKFQGRVTISSDKSISTAYMELSSLRSEDTAMYYCARGTYYYGTRVFDYWGQGTLVTVSSGGSGGSGGSDIVLTQSPASLAVSLGQRATISCKASQSVDFDGDSFMNWYQQKPGQPPKLLIYTTSNLESGIPARFSASGSGTDFTLNIHPVEEEDTATYYCQQSNEDPYTFGGGTKLELK

SEQ ID NO: 123 - protein, 496 aa, Artificial Sequence
  artificial antibody construct
QVTLKESGPGILQPSQTLSLTCSFSGFSLRTSGMGVGWIRQPSGKGLEWLAHIWWDDDKRYNPALKSRLTISKDTSSNQVFLKIASVDTADTATYYCAQINPAWFAYWGQGTLVTVSAGGSGGSGGSQPVLTQPPSVSVAPGKTARITCGGNNIGSKSVHWYQQKPGQAPVLVIYYDSDRPSGIPERFSGSNSGNTATLTISRVEAGDEADYYCQVWDTSSDHVLFGGGTKLTVLGGSGGSGGSGGSGGSGGSGGSQVQLQESGPGLVKPSETLSLTCTVSGGSVSSGSYYWSWIRQPPGKGLEWIGYIYYSGSTNYNPSLKSRVTISVDTSKNQFSLKLSSVTAADTAVYYCARNPISIPAFDIWGQGTMVTVSSGGSGGSGGSDIVLTQSPASLAVSLGQRATISCKASQSVDFDGDSFMNWYQQKPGQPPKLLIYTTSNLESGIPARFSASGSGTDFTLNIHPVEEEDTATYYCQQSNEDPYTFGGGTKLELK

SEQ ID NO: 124 - protein, 490 aa, Artificial Sequence
  artificial antibody construct
DIVLTQSPASLAVSLGQRATISCKASQSVDFDGDSFMNWYQQKPGQPPKLLIYTTSNLESGIPARFSASGSGTDFTLNIHPVEEEDTATYYCQQSNEDPYTFGGGTKLELKGGSGGSQVQLVESGGGLVKPGGSLRLSCAASGFTFSSYGMHWVRQAPGKGLEWVAFIRYDGSNKYYADSVKGRFTISRDNSKNTLYLQMNSLRAEDTAVYYCAKDRGLGDGTYFDYWGQGTTVTVSSGGSGGSGGSGGSGGSGGSQSALTQPASVSGSPGQSITISCSGSSSNIGNNAVNWYQQLPGKAPKLLIYYDDLLPSGVSDRFSGSKSGTSAFLAISGLQSEDEADYYCAAWDDSLNGPVFGGGTKLTVLGGSGGSQVTLKESGPGILQPSQTLSLTCSFSGFSLRTSGMGVGWIRQPSGKGLEWLAHIWWDDDKRYNPALKSRLTISKDTSSNQVFLKIASVDTADTATYYCAQINPAWFAYWGQGTLVTVSA

SEQ ID NO: 125 - protein, 482 aa, Artificial Sequence
  artificial antibody construct
DIVLTQSPASLAVSLGQRATISCKASQSVDFDGDSFMNWYQQKPGQPPKLLIYTTSNLESGIPARFSASGSGTDFTLNIHPVEEEDTATYYCQQSNEDPYTFGGGTKLELKGGSGGSQVQLQQWGAGLLKPSETLSLTCAVYGGSFSGYYWSWIRQPPGKGLEWIGEIDHSGSTNYNPSLKSRVTISVDTSKNQFSLKLSSVTAADTAVYYCARARGPWSFDPWGQGTLVTVSSGGSGGSGGSGGSGGSGGSDIQMTQSPSTLSASVGDRVTITCRASQSISSWLAWYQQKPGKAPKLLIYKASSLESGVPSRFSGSGSGTEFTLTISSLQPDDFATYYCQQYNSYPTFGGGTKVEIKGGSGGSQVTLKESGPGILQPSQTLSLTCSFSGFSLRTSGMGVGWIRQPSGKGLEWLAHIWWDDDKRYNPALKSRLTISKDTSSNQVFLKIASVDTADTATYYCAQINPAWFAYWGQGTLVTVSA

SEQ ID NO: 126 - protein, 486 aa, Artificial Sequence
  artificial antibody construct
DIVLTQSPASLAVSLGQRATISCKASQSVDFDGDSFMNWYQQKPGQPPKLLIYTTSNLESGIPARFSASGSGTDFTLNIHPVEEEDTATYYCQQSNEDPYTFGGGTKLELKGGSGGSQVQLQQSGPELVKPGASVKMSCKASGYTFTDYVINWGKQRSGQGLEWIGEIYPGSGTNYYNEKFKAKATLTADKSSNIAYMQLSSLTSEDSAVYFCARRGRYGLYAMDYWGQGTSVTVSSGGSGGSGGSGGSGGSGGSDIQMTQTTSSLSASLGDRVTISCRASQDISNYLNWYQQKPDGTVKLLIYYTSRLHSGVPSRFSGSGSGTDYSLTINNLEQEDIATYFCQQGNTRPWTFGGGTKLEIKGGSGGSQVTLKESGPGILQPSQTLSLTCSFSGFSLRTSGMGVGWIRQPSGKGLEWLAHIWWDDDKRYNPALKSRLTISKDTSSNQVFLKIASVDTADTATYYCAQINPAWFAYWGQGTLVTVSA

SEQ ID NO: 127 - protein, 482 aa, Artificial Sequence
  artificial antibody construct
DIVLTQSPASLAVSLGQRATISCKASQSVDFDGDSFMNWYQQKPGQPPKLLIYTTSNLESGIPARFSASGSGTDFTLNIHPVEEEDTATYYCQQSNEDPYTFGGGTKLELKGGSGGSEVQLQQSGPELVKPGASVKISCKTSGYTFTEYTMHWVKQSHGKSLEWIGGISPNIGGTSYNQKFKGKATLTVDKSSSTAYMELRSLTSEDSAVYYCARRGGSFDYWGQGTTLTVSSGGSGGSGGSGGSGGSGGSDIVMTQSPATLSVTPGDRVSLSCRASQSISDYLHWYQQKSHESPRLLIKYASQSISGIPSRFSGSGSGSDFTLSINSVEPEDVGVYYCQNGHSFPLTFGAGTKLELKGGSGGSQVTLKESGPGILQPSQTLSLTCSFSGFSLRTSGMGVGWIRQPSGKGLEWLAHIWWDDDKRYNPALKSRLTISKDTSSNQVFLKIASVDTADTATYYCAQINPAWFAYWGQGTLVTVSA

SEQ ID NO: 128 - protein, 487 aa, Artificial Sequence
  artificial antibody construct
SYELTQPLSVSVALGQTARITCGGHNIGSKNVHWYQQKPGQAPVLVIYQDNKRPSGIPERFSGSNSGNTATLTISRAQAGDEADYYCQVWDNYNVLFGCGTKLTVLGGSGGSQVQLVESGGGLVKPGGSLRLSCAASGFTFSSYGMHWVRQAPGKGLEWVAFIRYDGSNKYYADSVKGRFTISRDNSKNTLYLQMNSLRAEDTAVYYCAKDRGLGDGTYFDYWGQGTTVTVSSGGSGGSGGSGGSGGSGGSQSALTQPASVSGSPGQSITISCSGSSSNIGNNAVNWYQQLPGKAPKLLIYYDDLLPSGVSDRFSGSKSGTSAFLAISGLQSEDEADYYCAAWDDSLNGPVFGGGTKLTVLGGSGGSQVQLVQSGAEVKKPGASVKVSCKASGYTFTSYYMHWVRQAPGQCLEWMGAIEPTYGSTSYAQKFQGRVTMTRDTSTSTVYMELSSLRSEDTAVYYCARGSAYYYDFADYWGQGTLVTVSS

SEQ ID NO: 129 - protein, 479 aa, Artificial Sequence
  artificial antibody construct
SYELTQPLSVSVALGQTARITCGGHNIGSKNVHWYQQKPGQAPVLVIYQDNKRPSGIPERFSGSNSGNTATLTISRAQAGDEADYYCQVWDNYNVLFGCGTKLTVLGGSGGSQVQLQQWGAGLLKPSETLSLTCAVYGGSFSGYYWSWIRQPPGKGLEWIGEIDHSGSTNYNPSLKSRVTISVDTSKNQFSLKLSSVTAADTAVYYCARARGPWSFDPWGQGTLVTVSSGGSGGSGGSGGSGGSGGSDIQMTQSPSTLSASVGDRVTITCRASQSISSWLAWYQQKPGKAPKLLIYKASSLESGVPSRFSGSGSGTEFTLTISSLQPDDFATYYCQQYNSYPTFGGGTKVEIKGGSGGSQVQLVQSGAEVKKPGASVKVSCKASGYTFTSYYMHWVRQAPGQCLEWMGAIEPTYGSTSYAQKFQGRVTMTRDTSTSTVYMELSSLRSEDTAVYYCARGSAYYYDFADYWGQGTLVTVSS

SEQ ID NO: 130 - protein, 483 aa, Artificial Sequence
  artificial antibody construct
SYELTQPLSVSVALGQTARITCGGHNIGSKNVHWYQQKPGQAPVLVIYQDNKRPSGIPERFSGSNSGNTATLTISRAQAGDEADYYCQVWDNYNVLFGCGTKLTVLGGSGGSQVQLQQSGPELVKPGASVKMSCKASGYTFTDYVINWGKQRSGQGLEWIGEIYPGSGTNYYNEKFKAKATLTADKSSNIAYMQLSSLTSEDSAVYFCARRGRYGLYAMDYWGQGTSVTVSSGGSGGSGGSGGSGGSGGSDIQMTQTTSSLSASLGDRVTISCRASQDISNYLNWYQQKPDGTVKLLIYYTSRLHSGVPSRFSGSGSGTDYSLTINNLEQEDIATYFCQQGNTRPWTFGGGTKLEIKGGSGGSQVQLVQSGAEVKKPGASVKVSCKASGYTFTSYYMHWVRQAPGQCLEWMGAIEPTYGSTSYAQKFQGRVTMTRDTSTSTVYMELSSLRSEDTAVYYCARGSAYYYDFADYWGQGTLVTVSS

SEQ ID NO: 131 - protein, 479 aa, Artificial Sequence
  artificial antibody construct
SYELTQPLSVSVALGQTARITCGGHNIGSKNVHWYQQKPGQAPVLVIYQDNKRPSGIPERFSGSNSGNTATLTISRAQAGDEADYYCQVWDNYNVLFGCGTKLTVLGGSGGSEVQLQQSGPELVKPGASVKISCKTSGYTFTEYTMHWVKQSHGKSLEWIGGISPNIGGTSYNQKFKGKATLTVDKSSSTAYMELRSLTSEDSAVYYCARRGGSFDYWGQGTTLTVSSGGSGGSGGSGGSGGSGGSDIVMTQSPATLSVTPGDRVSLSCRASQSISDYLHWYQQKSHESPRLLIKYASQSISGIPSRFSGSGSGSDFTLSINSVEPEDVGVYYCQNGHSFPLTFGAGTKLELKGGSGGSQVQLVQSGAEVKKPGASVKVSCKASGYTFTSYYMHWVRQAPGQCLEWMGAIEPTYGSTSYAQKFQGRVTMTRDTSTSTVYMELSSLRSEDTAVYYCARGSAYYYDFADYWGQGTLVTVSS

SEQ ID NO: 132 - protein, 482 aa, Artificial Sequence
  artificial antibody construct
SYELTQPLSVSVALGQTARITCGGHNIGSKNVHWYQQKPGQAPVLVIYQDNKRPSGIPERFSGSNSGNTATLTISRAQAGDEADYYCQVWDNYNVLFGCGTKLTVLGGSGGSQVQLVQSGAEVKKPGASVKVSCKASGYTFTSYYMHWVRQAPGQCLEWMGAIEPTYGSTSYAQKFQGRVTMTRDTSTSTVYMELSSLRSEDTAVYYCARGSAYYYDFADYWGQGTLVTVSSGGSGGSGGSGGSGGSGGSSYELTQPLSVSVALGQTARITCGGHNIGSKNVHWYQQKPGQAPVLVIYQDNKRPSGIPERFSGSNSGNTATLTISRAQAGDEADYYCQVWDNYNVLFGCGTKLTVLGGSGGSQVQLVQSGAEVKKPGASVKVSCKASGYTFTSYYMHWVRQAPGQCLEWMGAIEPTYGSTSYAQKFQGRVTMTRDTSTSTVYMELSSLRSEDTAVYYCARGSAYYYDFADYWGQGTLVTVSS

SEQ ID NO: 133 - protein, 492 aa, Artificial Sequence
  artificial antibody construct
QSALTQPASVSGSPGQSITISCSGSSSNIGNNAVNWYQQLPGKAPKLLIYYDDLLPSGVSDRFSGSKSGTSAFLAISGLQSEDEADYYCAAWDDSLNGPVFGGGTKLTVLGGSGGSQVQLVESGGGLVKPGGSLRLSCAASGFTFSSYGMHWVRQAPGKGLEWVAFIRYDGSNKYYADSVKGRFTISRDNSKNTLYLQMNSLRAEDTAVYYCAKDRGLGDGTYFDYWGQGTTVTVSSGGSGGSGGSGGSGGSGGSQSALTQPASVSGSPGQSITISCSGSSSNIGNNAVNWYQQLPGKAPKLLIYYDDLLPSGVSDRFSGSKSGTSAFLAISGLQSEDEADYYCAAWDDSLNGPVFGGGTKLTVLGGSGGSQVQLVESGGGLVKPGGSLRLSCAASGFTFSSYGMHWVRQAPGKGLEWVAFIRYDGSNKYYADSVKGRFTISRDNSKNTLYLQMNSLRAEDTAVYYCAKDRGLGDGTYFDYWGQGTTVTVSS

SEQ ID NO: 134 - protein, 476 aa, Artificial Sequence
  artificial antibody construct
DIQMTQSPSTLSASVGDRVTITCRASQSISSWLAWYQQKPGKAPKLLIYKASSLESGVPSRFSGSGSGTEFTLTISSLQPDDFATYYCQQYNSYPTFGGGTKVEIKGGSGGSQVQLQQWGAGLLKPSETLSLTCAVYGGSFSGYYWSWIRQPPGKGLEWIGEIDHSGSTNYNPSLKSRVTISVDTSKNQFSLKLSSVTAADTAVYYCARARGPWSFDPWGQGTLVTVSSGGSGGSGGSGGSGGSGGSDIQMTQSPSTLSASVGDRVTITCRASQSISSWLAWYQQKPGKAPKLLIYKASSLESGVPSRFSGSGSGTEFTLTISSLQPDDFATYYCQQYNSYPTFGGGTKVEIKGGSGGSQVQLQQWGAGLLKPSETLSLTCAVYGGSFSGYYWSWIRQPPGKGLEWIGEIDHSGSTNYNPSLKSRVTISVDTSKNQFSLKLSSVTAADTAVYYCARARGPWSFDPWGQGTLVTVSS

SEQ ID NO: 135 - protein, 484 aa, Artificial Sequence
  artificial antibody construct
DIQMTQTTSSLSASLGDRVTISCRASQDISNYLNWYQQKPDGTVKLLIYYTSRLHSGVPSRFSGSGSGTDYSLTINNLEQEDIATYFCQQGNTRPWTFGGGTKLEIKGGSGGSQVQLQQSGPELVKPGASVKMSCKASGYTFTDYVINWGKQRSGQGLEWIGEIYPGSGTNYYNEKFKAKATLTADKSSNIAYMQLSSLTSEDSAVYFCARRGRYGLYAMDYWGQGTSVTVSSGGSGGSGGSGGSGGSGGSDIQMTQTTSSLSASLGDRVTISCRASQDISNYLNWYQQKPDGTVKLLIYYTSRLHSGVPSRFSGSGSGTDYSLTINNLEQEDIATYFCQQGNTRPWTFGGGTKLEIKGGSGGSQVQLQQSGPELVKPGASVKMSCKASGYTFTDYVINWGKQRSGQGLEWIGEIYPGSGTNYYNEKFKAKATLTADKSSNIAYMQLSSLTSEDSAVYFCARRGRYGLYAMDYWGQGTSVTVSS

SEQ ID NO: 136 - protein, 476 aa, Artificial Sequence
  artificial antibody construct
DIVMTQSPATLSVTPGDRVSLSCRASQSISDYLHWYQQKSHESPRLLIKYASQSISGIPSRFSGSGSGSDFTLSINSVEPEDVGVYYCQNGHSFPLTFGAGTKLELKGGSGGSEVQLQQSGPELVKPGASVKISCKTSGYTFTEYTMHWVKQSHGKSLEWIGGISPNIGGTSYNQKFKGKATLTVDKSSSTAYMELRSLTSEDSAVYYCARRGGSFDYWGQGTTLTVSSGGSGGSGGSGGSGGSGGSDIVMTQSPATLSVTPGDRVSLSCRASQSISDYLHWYQQKSHESPRLLIKYASQSISGIPSRFSGSGSGSDFTLSINSVEPEDVGVYYCQNGHSFPLTFGAGTKLELKGGSGGSEVQLQQSGPELVKPGASVKISCKTSGYTFTEYTMHWVKQSHGKSLEWIGGISPNIGGTSYNQKFKGKATLTVDKSSSTAYMELRSLTSEDSAVYYCARRGGSFDYWGQGTTLTVSS

SEQ ID NO: 137 - protein, 505 aa, Artificial Sequence
  artificial antibody construct
EVQLVESGGGLVKPGGSLKLSCAASGYTFTSYVMHWVRQAPGKGLEWIGYINPYNDGTKYNEKFQGRVTISSDKSISTAYMELSSLRSEDTAMYYCARGTYYYGTRVFDYWGQGTLVTVSSGGSGGSGGSDIVMTQSPATLSLSPGERATLSCRSSKSLQNVNGNTYLYWFQQKPGQSPQLLIYRMSNLNSGVPDRFSGSGSGTEFTLTISSLEPEDFAVYYCMQHLEYPITFGAGTKLEIKGGSGGSGGSGGSGGSGGSGGSEVQLVESGGGLVKPGGSLKLSCAASGYTFTSYVMHWVRQAPGKGLEWIGYINPYNDGTKYNEKFQGRVTISSDKSISTAYMELSSLRSEDTAMYYCARGTYYYGTRVFDYWGQGTLVTVSSGGSGGSGGSDIVMTQSPATLSLSPGERATLSCRSSKSLQNVNGNTYLYWFQQKPGQSPQLLIYRMSNLNSGVPDRFSGSGSGTEFTLTISSLEPEDFAVYYCMQHLEYPITFGAGTKLEIK

SEQ ID NO: 138 - protein, 495 aa, Artificial Sequence
  artificial antibody construct
EVQLQESGPGLVKPSETLSLTCTVSGGSVSSGSYYWSWIRQPPGKGLEWIGYIYYSGSTNYNPSLKSRVTISVDTSKNQFSLKLSSVTAADTAVYYCARNPISIPAFDIWGQGTMVTVSSGGSGGSGGSQPVLTQPPSVSVAPGKTARITCGGNNIGSKSVHWYQQKPGQAPVLVIYYDSDRPSGIPERFSGSNSGNTATLTISRVEAGDEADYYCQVWDTSSDHVLFGGGTKLTVLGGSGGSGGSGGSGGSGGSGGSQVQLQESGPGLVKPSETLSLTCTVSGGSVSSGSYYWSWIRQPPGKGLEWIGYIYYSGSTNYNPSLKSRVTISVDTSKNQFSLKLSSVTAADTAVYYCARNPISIPAFDIWGQGTMVTVSSGGSGGSGGSQPVLTQPPSVSVAPGKTARITCGGNNIGSKSVHWYQQKPGQAPVLVIYYDSDRPSGIPERFSGSNSGNTATLTISRVEAGDEADYYCQVWDTSSDHVLFGGGTKLTVL

SEQ ID NO: 139 - protein, 503 aa, Artificial Sequence
  artificial antibody construct
EVQLVESGGGLVKPGGSLKLSCAASGYTFTSYVMHWVRQAPGKGLEWIGYINPYNDGTKYNEKFQGRVTISSDKSISTAYMELSSLRSEDTAMYYCARGTYYYGTRVFDYWGQGTLVTVSSGGSGGSGGSGGSGGSGGSDIVMTQSPATLSLSPGERATLSCRSSKSLQNVNGNTYLYWFQQKPGQSPQLLIYRMSNLNSGVPDRFSGSGSGTEFTLTISSLEPEDFAVYYCMQHLEYPITFGAGTKLEIKGGGGSSYELTQPLSVSVALGQTARITCGGNNIGSKSVHWYQQKPGQAPVLVIYQDKKRPSGIPERFSGSNSGNTATLTISRAQAGDEADYYCQVWDDYIVLFGCGTKLTVLGGSGGSGGSGGSGGSGGSGGSQVQLVQSGAEVKKPGASVKVSCKASGYTFTNYYMQWVRQAPGQCLEWMGIINPSGGVTSYAQKFQGRVTMTRDTSTSTVYMELSSLRSEDTAVYYCARGSAYYYDFADYWGQGTLVTVSS

SEQ ID NO: 140 - protein, 508 aa, Artificial Sequence
  artificial antibody construct
EVQLVESGGGLVKPGGSLKLSCAASGYTFTSYVMHWVRQAPGKGLEWIGYINPYNDGTKYNEKFQGRVTISSDKSISTAYMELSSLRSEDTAMYYCARGTYYYGTRVFDYWGQGTLVTVSSGGSGGSGGSGGSGGSGGSDIVMTQSPATLSLSPGERATLSCRSSKSLQNVNGNTYLYWFQQKPGQSPQLLIYRMSNLNSGVPDRFSGSGSGTEFTLTISSLEPEDFAVYYCMQHLEYPITFGAGTKLEIKGGGGSQSALTQPASVSGSPGQSITISCSGSSSNIGNNAVNWYQQLPGKAPKLLIYYDDLLPSGVSDRFSGSKSGTSAFLAISGLQSEDEADYYCAAWDDSLNGPVFGGGTKLTVLGGSGGSGGSGGSGGSGGSGGSQVQLVESGGGLVKPGGSLRLSCAASGFTFSSYGMHWVRQAPGKGLEWVAFIRYDGSNKYYADSVKGRFTISRDNSKNTLYLQMNSLRAEDTAVYYCAKDRGLGDGTYFDYWGQGTTVTVSS

SEQ ID NO: 141 - protein, 500 aa, Artificial Sequence
  artificial antibody construct
EVQLVESGGGLVKPGGSLKLSCAASGYTFTSYVMHWVRQAPGKGLEWIGYINPYNDGTKYNEKFQGRVTISSDKSISTAYMELSSLRSEDTAMYYCARGTYYYGTRVFDYWGQGTLVTVSSGGSGGSGGSGGSGGSGGSDIVMTQSPATLSLSPGERATLSCRSSKSLQNVNGNTYLYWFQQKPGQSPQLLIYRMSNLNSGVPDRFSGSGSGTEFTLTISSLEPEDFAVYYCMQHLEYPITFGAGTKLEIKGGGGSDIQMTQSPSTLSASVGDRVTITCRASQSISSWLAWYQQKPGKAPKLLIYKASSLESGVPSRFSGSGSGTEFTLTISSLQPDDFATYYCQQYNSYPTFGGGTKVEIKGGSGGSGGSGGSGGSGGSGGSQVQLQQWGAGLLKPSETLSLTCAVYGGSFSGYYWSWIRQPPGKGLEWIGEIDHSGSTNYNPSLKSRVTISVDTSKNQFSLKLSSVTAADTAVYYCARARGPWSFDPWGQGTLVTVSS

SEQ ID NO: 142 - protein, 504 aa, Artificial Sequence
  artificial antibody construct
EVQLVESGGGLVKPGGSLKLSCAASGYTFTSYVMHWVRQAPGKGLEWIGYINPYNDGTKYNEKFQGRVTISSDKSISTAYMELSSLRSEDTAMYYCARGTYYYGTRVFDYWGQGTLVTVSSGGSGGSGGSGGSGGSGGSDIVMTQSPATLSLSPGERATLSCRSSKSLQNVNGNTYLYWFQQKPGQSPQLLIYRMSNLNSGVPDRFSGSGSGTEFTLTISSLEPEDFAVYYCMQHLEYPITFGAGTKLEIKGGGGSDIQMTQTTSSLSASLGDRVTISCRASQDISNYLNWYQQKPDGTVKLLIYYTSRLHSGVPSRFSGSGSGTDYSLTINNLEQEDIATYFCQQGNTRPWTFGGGTKLEIKGGSGGSGGSGGSGGSGGSGGSQVQLQQSGPELVKPGASVKMSCKASGYTFTDYVINWGKQRSGQGLEWIGEIYPGSGTNYYNEKFKAKATLTADKSSNIAYMQLSSLTSEDSAVYFCARRGRYGLYAMDYWGQGTSVTVSS

SEQ ID NO: 143 - protein, 500 aa, Artificial Sequence
  artificial antibody construct
EVQLVESGGGLVKPGGSLKLSCAASGYTFTSYVMHWVRQAPGKGLEWIGYINPYNDGTKYNEKFQGRVTISSDKSISTAYMELSSLRSEDTAMYYCARGTYYYGTRVFDYWGQGTLVTVSSGGSGGSGGSGGSGGSGGSDIVMTQSPATLSLSPGERATLSCRSSKSLQNVNGNTYLYWFQQKPGQSPQLLIYRMSNLNSGVPDRFSGSGSGTEFTLTISSLEPEDFAVYYCMQHLEYPITFGAGTKLEIKGGGGSDIVMTQSPATLSVTPGDRVSLSCRASQSISDYLHWYQQKSHESPRLLIKYASQSISGIPSRFSGSGSGSDFTLSINSVEPEDVGVYYCQNGHSFPLTFGAGTKLELKGGSGGSGGSGGSGGSGGSGGSEVQLQQSGPELVKPGASVKISCKTSGYTFTEYTMHWVKQSHGKSLEWIGGISPNIGGTSYNQKFKGKATLTVDKSSSTAYMELRSLTSEDSAVYYCARRGGSFDYWGQGTTLTVSS

SEQ ID NO: 144 - protein, 498 aa, Artificial Sequence
  artificial antibody construct
EVQLQESGPGLVKPSETLSLTCTVSGGSVSSGSYYWSWIRQPPGKGLEWIGYIYYSGSTNYNPSLKSRVTISVDTSKNQFSLKLSSVTAADTAVYYCARNPISIPAFDIWGQGTMVTVSSGGSGGSGGSGGSGGSGGSQPVLTQPPSVSVAPGKTARITCGGNNIGSKSVHWYQQKPGQAPVLVIYYDSDRPSGIPERFSGSNSGNTATLTISRVEAGDEADYYCQVWDTSSDHVLFGGGTKLTVLGGGGSSYELTQPLSVSVALGQTARITCGGNNIGSKSVHWYQQKPGQAPVLVIYQDKKRPSGIPERFSGSNSGNTATLTISRAQAGDEADYYCQVWDDYIVLFGCGTKLTVLGGSGGSGGSGGSGGSGGSGGSQVQLVQSGAEVKKPGASVKVSCKASGYTFTNYYMQWVRQAPGQCLEWMGIINPSGGVTSYAQKFQGRVTMTRDTSTSTVYMELSSLRSEDTAVYYCARGSAYYYDFADYWGQGTLVTVSS

SEQ ID NO: 145 - protein, 503 aa, Artificial Sequence
  artificial antibody construct
EVQLQESGPGLVKPSETLSLTCTVSGGSVSSGSYYWSWIRQPPGKGLEWIGYIYYSGSTNYNPSLKSRVTISVDTSKNQFSLKLSSVTAADTAVYYCARNPISIPAFDIWGQGTMVTVSSGGSGGSGGSGGSGGSGGSQPVLTQPPSVSVAPGKTARITCGGNNIGSKSVHWYQQKPGQAPVLVIYYDSDRPSGIPERFSGSNSGNTATLTISRVEAGDEADYYCQVWDTSSDHVLFGGGTKLTVLGGGGSQSALTQPASVSGSPGQSITISCSGSSSNIGNNAVNWYQQLPGKAPKLLIYYDDLLPSGVSDRFSGSKSGTSAFLAISGLQSEDEADYYCAAWDDSLNGPVFGGGTKLTVLGGSGGSGGSGGSGGSGGSGGSQVQLVESGGGLVKPGGSLRLSCAASGFTFSSYGMHWVRQAPGKGLEWVAFIRYDGSNKYYADSVKGRFTISRDNSKNTLYLQMNSLRAEDTAVYYCAKDRGLGDGTYFDYWGQGTTVTVSS

SEQ ID NO: 146 - protein, 495 aa, Artificial Sequence
  artificial antibody construct
EVQLQESGPGLVKPSETLSLTCTVSGGSVSSGSYYWSWIRQPPGKGLEWIGYIYYSGSTNYNPSLKSRVTISVDTSKNQFSLKLSSVTAADTAVYYCARNPISIPAFDIWGQGTMVTVSSGGSGGSGGSGGSGGSGGSQPVLTQPPSVSVAPGKTARITCGGNNIGSKSVHWYQQKPGQAPVLVIYYDSDRPSGIPERFSGSNSGNTATLTISRVEAGDEADYYCQVWDTSSDHVLFGGGTKLTVLGGGGSDIQMTQSPSTLSASVGDRVTITCRASQSISSWLAWYQQKPGKAPKLLIYKASSLESGVPSRFSGSGSGTEFTLTISSLQPDDFATYYCQQYNSYPTFGGGTKVEIKGGSGGSGGSGGSGGSGGSGGSQVQLQQWGAGLLKPSETLSLTCAVYGGSFSGYYWSWIRQPPGKGLEWIGEIDHSGSTNYNPSLKSRVTISVDTSKNQFSLKLSSVTAADTAVYYCARARGPWSFDPWGQGTLVTVSS

SEQ ID NO: 147 - protein, 499 aa, Artificial Sequence
  artificial antibody construct
EVQLQESGPGLVKPSETLSLTCTVSGGSVSSGSYYWSWIRQPPGKGLEWIGYIYYSGSTNYNPSLKSRVTISVDTSKNQFSLKLSSVTAADTAVYYCARNPISIPAFDIWGQGTMVTVSSGGSGGSGGSGGSGGSGGSQPVLTQPPSVSVAPGKTARITCGGNNIGSKSVHWYQQKPGQAPVLVIYYDSDRPSGIPERFSGSNSGNTATLTISRVEAGDEADYYCQVWDTSSDHVLFGGGTKLTVLGGGGSDIQMTQTTSSLSASLGDRVTISCRASQDISNYLNWYQQKPDGTVKLLIYYTSRLHSGVPSRFSGSGSGTDYSLTINNLEQEDIATYFCQQGNTRPWTFGGGTKLEIKGGSGGSGGSGGSGGSGGSGGSQVQLQQSGPELVKPGASVKMSCKASGYTFTDYVINWGKQRSGQGLEWIGEIYPGSGTNYYNEKFKAKATLTADKSSNIAYMQLSSLTSEDSAVYFCARRGRYGLYAMDYWGQGTSVTVSS

SEQ ID NO: 148 - protein, 495 aa, Artificial Sequence
  artificial antibody construct
EVQLQESGPGLVKPSETLSLTCTVSGGSVSSGSYYWSWIRQPPGKGLEWIGYIYYSGSTNYNPSLKSRVTISVDTSKNQFSLKLSSVTAADTAVYYCARNPISIPAFDIWGQGTMVTVSSGGSGGSGGSGGSGGSGGSQPVLTQPPSVSVAPGKTARITCGGNNIGSKSVHWYQQKPGQAPVLVIYYDSDRPSGIPERFSGSNSGNTATLTISRVEAGDEADYYCQVWDTSSDHVLFGGGTKLTVLGGGGSDIVMTQSPATLSVTPGDRVSLSCRASQSISDYLHWYQQKSHESPRLLIKYASQSISGIPSRFSGSGSGSDFTLSINSVEPEDVGVYYCQNGHSFPLTFGAGTKLELKGGSGGSGGSGGSGGSGGSGGSEVQLQQSGPELVKPGASVKISCKTSGYTFTEYTMHWVKQSHGKSLEWIGGISPNIGGTSYNQKFKGKATLTVDKSSSTAYMELRSLTSEDSAVYYCARRGGSFDYWGQGTTLTVSS

SEQ ID NO: 149 - protein, 247 aa, Artificial Sequence
  artificial antibody construct
SYELTQPLSVSVALGQTARITCGGNNIGSKSVHWYQQKPGQAPVLVIYQDKKRPSGIPERFSGSNSGNTATLTISRAQAGDEADYYCQVWDDYIVLFGCGTKLTVLGGSGGSGGSGGSGGSGGSGGSQVQLVQSGAEVKKPGASVKVSCKASGYTFTNYYMQWVRQAPGQCLEWMGIINPSGGVTSYAQKFQGRVTMTRDTSTSTVYMELSSLRSEDTAVYYCARGSAYYYDFADYWGQGTLVTVSS

SEQ ID NO: 150 - protein, 249 aa, Artificial Sequence
  artificial antibody construct
QVQLVESGGGLVKPGGSLRLSCAASGFTFSSYGMHWVRQAPGKGLEWVAFIRYDGSNKYYADSVKGRFTISRDNSKNTLYLQMNSLRAEDTAVYYCAKDRGLGDGTYFDYWGQGTTVTVSSGGSGGSGGSGGSGGSGGSQSALTQPASVSGSPGQSITISCSGSSSNIGNNAVNWYQQLPGKAPKLLIYYDDLLPSGVSDRFSGSKSGTSAFLAISGLQSEDEADYYCAAWDDSLNGPVFGGGTKLTVL

SEQ ID NO: 151 - protein, 249 aa, Artificial Sequence
  artificial antibody construct
EVQLVESGGGLVKPGGSLRLSCAASGFTFSSYGMHWVRQAPGKGLEWVAFIRYDGSNKYYADSVKGRFTISRDNSKNTLYLQMNSLRAEDTAVYYCAKDRGLGDGTYFDYWGQGTTVTVSSGGSGGSGGSGGSGGSGGSQSALTQPASVSGSPGQSITISCSGSSSNIGNNAVNWYQQLPGKAPKLLIYYDDLLPSGVSDRFSGSKSGTSAFLAISGLQSEDEADYYCAAWDDSLNGPVFGGGTKLTVL

SEQ ID NO: 152 - protein, 241 aa, Artificial Sequence
  artificial antibody construct
QVQLQQWGAGLLKPSETLSLTCAVYGGSFSGYYWSWIRQPPGKGLEWIGEIDHSGSTNYNPSLKSRVTISVDTSKNQFSLKLSSVTAADTAVYYCARARGPWSFDPWGQGTLVTVSSGGSGGSGGSGGSGGSGGSDIQMTQSPSTLSASVGDRVTITCRASQSISSWLAWYQQKPGKAPKLLIYKASSLESGVPSRFSGSGSGTEFTLTISSLQPDDFATYYCQQYNSYPTFGGGTKVEIK

SEQ ID NO: 153 - protein, 241 aa, Artificial Sequence
  artificial antibody construct
EVQLQQWGAGLLKPSETLSLTCAVYGGSFSGYYWSWIRQPPGKGLEWIGEIDHSGSTNYNPSLKSRVTISVDTSKNQFSLKLSSVTAADTAVYYCARARGPWSFDPWGQGTLVTVSSGGSGGSGGSGGSGGSGGSDIQMTQSPSTLSASVGDRVTITCRASQSISSWLAWYQQKPGKAPKLLIYKASSLESGVPSRFSGSGSGTEFTLTISSLQPDDFATYYCQQYNSYPTFGGGTKVEIK

SEQ ID NO: 154 - protein, 245 aa, Artificial Sequence
  artificial antibody construct
QVQLQQSGPELVKPGASVKMSCKASGYTFTDYVINWGKQRSGQGLEWIGEIYPGSGTNYYNEKFKAKATLTADKSSNIAYMQLSSLTSEDSAVYFCARRGRYGLYAMDYWGQGTSVTVSSGGSGGSGGSGGSGGSGGSDIQMTQTTSSLSASLGDRVTISCRASQDISNYLNWYQQKPDGTVKLLIYYTSRLHSGVPSRFSGSGSGTDYSLTINNLEQEDIATYFCQQGNTRPWTFGGGTKLEIK

SEQ ID NO: 155 - protein, 245 aa, Artificial Sequence
  artificial antibody construct
EVQLQQSGPELVKPGASVKMSCKASGYTFTDYVINWGKQRSGQGLEWIGEIYPGSGTNYYNEKFKAKATLTADKSSNIAYMQLSSLTSEDSAVYFCARRGRYGLYAMDYWGQGTSVTVSSGGSGGSGGSGGSGGSGGSDIQMTQTTSSLSASLGDRVTISCRASQDISNYLNWYQQKPDGTVKLLIYYTSRLHSGVPSRFSGSGSGTDYSLTINNLEQEDIATYFCQQGNTRPWTFGGGTKLEIK

SEQ ID NO: 156 - protein, 241 aa, Artificial Sequence
  artificial antibody construct
EVQLQQSGPELVKPGASVKISCKTSGYTFTEYTMHWVKQSHGKSLEWIGGISPNIGGTSYNQKFKGKATLTVDKSSSTAYMELRSLTSEDSAVYYCARRGGSFDYWGQGTTLTVSSGGSGGSGGSGGSGGSGGSDIVMTQSPATLSVTPGDRVSLSCRASQSISDYLHWYQQKSHESPRLLIKYASQSISGIPSRFSGSGSGSDFTLSINSVEPEDVGVYYCQNGHSFPLTFGAGTKLELK

SEQ ID NO: 157 - protein, 250 aa, Artificial Sequence
  artificial antibody construct
DIVLTQSPASLAVSLGQRATISCKASQSVDFDGDSFMNWYQQKPGQPPKLLIYTTSNLESGIPARFSASGSGTDFTLNIHPVEEEDTATYYCQQSNEDPYTFGGGTKLELKGGSGGSGGSGGSGGSGGSGGSQVTLKESGPGILQPSQTLSLTCSFSGFSLRTSGMGVGWIRQPSGKGLEWLAHIWWDDDKRYNPALKSRLTISKDTSSNQVFLKIASVDTADTATYYCAQINPAWFAYWGQGTLVTVSA

SEQ ID NO: 158 - protein, 254 aa, Artificial Sequence
  artificial antibody construct
DIVMTQSPATLSLSPGERATLSCRSSKSLQNVNGNTYLYWFQQKPGQSPQLLIYRMSNLNSGVPDRFSGSGSGTEFTLTISSLEPEDFAVYYCMQHLEYPITFGAGTKLEIKGGSGGSGGSGGSGGSGGSGGSEVQLVESGGGLVKPGGSLKLSCAASGYTFTSYVMHWVRQAPGKGLEWIGYINPYNDGTKYNEKFQGRVTISSDKSISTAYMELSSLRSEDTAMYYCARGTYYYGTRVFDYWGQGTLVTVSS

SEQ ID NO: 159 - protein, 251 aa, Artificial Sequence
  artificial antibody construct
EVQLVESGGGLVKPGGSLKLSCAASGYTFTSYVMHWVRQAPGKGLEWIGYINPYNDGTKYNEKFQGRVTISSDKSISTAYMELSSLRSEDTAMYYCARGTYYYGTRVFDYWGQGTLVTVSSGGSGGSGGSGGSGGSGGSDIVMTQSPATLSLSPGERATLSCRSSKSLQNVNGNTYLYWFQQKPGQSPQLLIYRMSNLNSGVPDRFSGSGSGTEFTLTISSLEPEDFAVYYCMQHLEYPITFGAGTKLEIK

SEQ ID NO: 160 - protein, 249 aa, Artificial Sequence
  artificial antibody construct
QPVLTQPPSVSVAPGKTARITCGGNNIGSKSVHWYQQKPGQAPVLVIYYDSDRPSGIPERFSGSNSGNTATLTISRVEAGDEADYYCQVWDTSSDHVLFGGGTKLTVLGGSGGSGGSGGSGGSGGSGGSQVQLQESGPGLVKPSETLSLTCTVSGGSVSSGSYYWSWIRQPPGKGLEWIGYIYYSGSTNYNPSLKSRVTISVDTSKNQFSLKLSSVTAADTAVYYCARNPISIPAFDIWGQGTMVTVSS

SEQ ID NO: 161 - protein, 1433 aa, Artificial Sequence
  artificial antibody construct
EVQLVESGGGLVKPGGSLKLSCAASGYTFTSYVMHWVRQAPGKGLEWIGYINPYNDGTKYNEKFQGRVTISSDKSISTAYMELSSLRSEDTAMYYCARGTYYYGTRVFDYWGQGTLVTVSSASTKGPSVFPLAPSSKSTSGGTAALGCLVKDYFPEPVTVSWNSGALTSGVHTFPAVLQSSGLYSLSSVVTVPSSSLGTQTYICNVNHKPSNTKVDKKVEPKSCDKTHTEVQLVESGGGLVKPGGSLKLSCAASGYTFTSYVMHWVRQAPGKGLEWIGYINPYNDGTKYNEKFQGRVTISSDKSISTAYMELSSLRSEDTAMYYCARGTYYYGTRVFDYWGQGTLVTVSSASTKGPSVFPLAPSSKSTSGGTAALGCLVKDYFPEPVTVSWNSGALTSGVHTFPAVLQSSGLYSLSSVVTVPSSSLGTQTYICNVNHKPSNTKVDKKVEPKSCDKTHTCPPCPAPEFEGGPSVFLFPPKPKDTLMISRTPEVTCVVVAVSHEDPEVKFNWYVDGVEVHNAKTKPCEEQYGSTYRCVSVLTVLHQDWLNGKEYKCKVSNKALPAPIEKTISKAKGQPREPQVYTLPPSREEMTKNQVSLTCLVKGFYPSDIAVEWESNGQPENNYKTTPPVLDSDGSFFLYSKLTVDKSRWQQGNVFSCSVMHEALHNHYTQKSLSLSPGKGGGGSGGGGSGGGGSGGGGSGGGGSGGGGSDKTHTCPPCPAPEFEGGPSVFLFPPKPKDTLMISRTPEVTCVVVAVSHEDPEVKFNWYVDGVEVHNAKTKPCEEQYGSTYRCVSVLTVLHQDWLNGKEYKCKVSNKALPAPIEKTISKAKGQPREPQVYTLPPSREEMTKNQVSLTCLVKGFYPSDIAVEWESNGQPENNYKTTPPVLDSDGSFFLYSKLTVDKSRWQQGNVFSCSVMHEALHNHYTQKSLSLSPGGGGGSGGGGSSYELTQPLSVSVALGQTARITCGGNNIGSKSVHWYQQKPGQAPVLVIYQDKKRPSGIPERFSGSNSGNTATLTISRAQAGDEADYYCQVWDDYIVLFGCGTKLTVLGGSGGSQVQLVESGGGLVKPGGSLRLSCAASGFTFSSYGMHWVRQAPGKGLEWVAFIRYDGSNKYYADSVKGRFTISRDNSKNTLYLQMNSLRAEDTAVYYCAKDRGLGDGTYFDYWGQGTTVTVSSGGSGGSGGSGGSGGSGGSQSALTQPASVSGSPGQSITISCSGSSSNIGNNAVNWYQQLPGKAPKLLIYYDDLLPSGVSDRFSGSKSGTSAFLAISGLQSEDEADYYCAAWDDSLNGPVFGGGTKLTVLGGSGGSQVQLVQSGAEVKKPGASVKVSCKASGYTFTNYYMQWVRQAPGQCLEWMGIINPSGGVTSYAQKFQGRVTMTRDTSTSTVYMELSSLRSEDTAVYYCARGSAYYYDFADYWGQGTLVTVSS

SEQ ID NO: 162 - protein, 219 aa, Artificial Sequence
  artificial antibody construct
DIVMTQSPATLSLSPGERATLSCRSSKSLQNVNGNTYLYWFQQKPGQSPQLLIYRMSNLNSGVPDRFSGSGSGTEFTLTISSLEPEDFAVYYCMQHLEYPITFGAGTKLEIKRTVAAPSVFIFPPSDEQLKSGTASVVCLLNNFYPREAKVQWKVDNALQSGNSQESVTEQDSKDSTYSLSSTLTLSKADYEKHKVYACEVTHQGLSSPVTKSFNRGEC

SEQ ID NO: 163 - protein, 1425 aa, Artificial Sequence
  artificial antibody construct
EVQLVESGGGLVKPGGSLKLSCAASGYTFTSYVMHWVRQAPGKGLEWIGYINPYNDGTKYNEKFQGRVTISSDKSISTAYMELSSLRSEDTAMYYCARGTYYYGTRVFDYWGQGTLVTVSSASTKGPSVFPLAPSSKSTSGGTAALGCLVKDYFPEPVTVSWNSGALTSGVHTFPAVLQSSGLYSLSSVVTVPSSSLGTQTYICNVNHKPSNTKVDKKVEPKSCDKTHTEVQLVESGGGLVKPGGSLKLSCAASGYTFTSYVMHWVRQAPGKGLEWIGYINPYNDGTKYNEKFQGRVTISSDKSISTAYMELSSLRSEDTAMYYCARGTYYYGTRVFDYWGQGTLVTVSSASTKGPSVFPLAPSSKSTSGGTAALGCLVKDYFPEPVTVSWNSGALTSGVHTFPAVLQSSGLYSLSSVVTVPSSSLGTQTYICNVNHKPSNTKVDKKVEPKSCDKTHTCPPCPAPEFEGGPSVFLFPPKPKDTLMISRTPEVTCVVVAVSHEDPEVKFNWYVDGVEVHNAKTKPCEEQYGSTYRCVSVLTVLHQDWLNGKEYKCKVSNKALPAPIEKTISKAKGQPREPQVYTLPPSREEMTKNQVSLTCLVKGFYPSDIAVEWESNGQPENNYKTTPPVLDSDGSFFLYSKLTVDKSRWQQGNVFSCSVMHEALHNHYTQKSLSLSPGKGGGGSGGGGSGGGGSGGGGSGGGGSGGGGSDKTHTCPPCPAPEFEGGPSVFLFPPKPKDTLMISRTPEVTCVVVAVSHEDPEVKFNWYVDGVEVHNAKTKPCEEQYGSTYRCVSVLTVLHQDWLNGKEYKCKVSNKALPAPIEKTISKAKGQPREPQVYTLPPSREEMTKNQVSLTCLVKGFYPSDIAVEWESNGQPENNYKTTPPVLDSDGSFFLYSKLTVDKSRWQQGNVFSCSVMHEALHNHYTQKSLSLSPGGGGGSGGGGSSYELTQPLSVSVALGQTARITCGGNNIGSKSVHWYQQKPGQAPVLVIYQDKKRPSGIPERFSGSNSGNTATLTISRAQAGDEADYYCQVWDDYIVLFGCGTKLTVLGGSGGSQVQLQQWGAGLLKPSETLSLTCAVYGGSFSGYYWSWIRQPPGKGLEWIGEIDHSGSTNYNPSLKSRVTISVDTSKNQFSLKLSSVTAADTAVYYCARARGPWSFDPWGQGTLVTVSSGGSGGSGGSGGSGGSGGSDIQMTQSPSTLSASVGDRVTITCRASQSISSWLAWYQQKPGKAPKLLIYKASSLESGVPSRFSGSGSGTEFTLTISSLQPDDFATYYCQQYNSYPTFGGGTKVEIKGGSGGSQVQLVQSGAEVKKPGASVKVSCKASGYTFTNYYMQWVRQAPGQCLEWMGIINPSGGVTSYAQKFQGRVTMTRDTSTSTVYMELSSLRSEDTAVYYCARGSAYYYDFADYWGQGTLVTVSS

SEQ ID NO: 164 - protein, 219 aa, Artificial Sequence; identical to SEQ ID NO: 162
  artificial antibody construct

SEQ ID NO: 165 - protein, 1429 aa, Artificial Sequence
  artificial antibody construct
EVQLVESGGGLVKPGGSLKLSCAASGYTFTSYVMHWVRQAPGKGLEWIGYINPYNDGTKYNEKFQGRVTISSDKSISTAYMELSSLRSEDTAMYYCARGTYYYGTRVFDYWGQGTLVTVSSASTKGPSVFPLAPSSKSTSGGTAALGCLVKDYFPEPVTVSWNSGALTSGVHTFPAVLQSSGLYSLSSVVTVPSSSLGTQTYICNVNHKPSNTKVDKKVEPKSCDKTHTEVQLVESGGGLVKPGGSLKLSCAASGYTFTSYVMHWVRQAPGKGLEWIGYINPYNDGTKYNEKFQGRVTISSDKSISTAYMELSSLRSEDTAMYYCARGTYYYGTRVFDYWGQGTLVTVSSASTKGPSVFPLAPSSKSTSGGTAALGCLVKDYFPEPVTVSWNSGALTSGVHTFPAVLQSSGLYSLSSVVTVPSSSLGTQTYICNVNHKPSNTKVDKKVEPKSCDKTHTCPPCPAPEFEGGPSVFLFPPKPKDTLMISRTPEVTCVVVAVSHEDPEVKFNWYVDGVEVHNAKTKPCEEQYGSTYRCVSVLTVLHQDWLNGKEYKCKVSNKALPAPIEKTISKAKGQPREPQVYTLPPSREEMTKNQVSLTCLVKGFYPSDIAVEWESNGQPENNYKTTPPVLDSDGSFFLYSKLTVDKSRWQQGNVFSCSVMHEALHNHYTQKSLSLSPGKGGGGSGGGGSGGGGSGGGGSGGGGSGGGGSDKTHTCPPCPAPEFEGGPSVFLFPPKPKDTLMISRTPEVTCVVVAVSHEDPEVKFNWYVDGVEVHNAKTKPCEEQYGSTYRCVSVLTVLHQDWLNGKEYKCKVSNKALPAPIEKTISKAKGQPREPQVYTLPPSREEMTKNQVSLTCLVKGFYPSDIAVEWESNGQPENNYKTTPPVLDSDGSFFLYSKLTVDKSRWQQGNVFSCSVMHEALHNHYTQKSLSLSPGGGGGSGGGGSSYELTQPLSVSVALGQTARITCGGNNIGSKSVHWYQQKPGQAPVLVIYQDKKRPSGIPERFSGSNSGNTATLTISRAQAGDEADYYCQVWDDYIVLFGCGTKLTVLGGSGGSQVQLQQSGPELVKPGASVKMSCKASGYTFTDYVINWGKQRSGQGLEWIGEIYPGSGTNYYNEKFKAKATLTADKSSNIAYMQLSSLTSEDSAVYFCARRGRYGLYAMDYWGQGTSVTVSSGGSGGSGGSGGSGGSGGSDIQMTQTTSSLSASLGDRVTISCRASQDISNYLNWYQQKPDGTVKLLIYYTSRLHSGVPSRFSGSGSGTDYSLTINNLEQEDIATYFCQQGNTRPWTFGGGTKLEIKGGSGGSQVQLVQSGAEVKKPGASVKVSCKASGYTFTNYYMQWVRQAPGQCLEWMGIINPSGGVTSYAQKFQGRVTMTRDTSTSTVYMELSSLRSEDTAVYYCARGSAYYYDFADYWGQGTLVTVSS

SEQ ID NO: 166 - protein, 219 aa, Artificial Sequence; identical to SEQ ID NO: 162
  artificial antibody construct

SEQ ID NO: 167 - protein, 1425 aa, Artificial Sequence
  artificial antibody construct
EVQLVESGGGLVKPGGSLKLSCAASGYTFTSYVMHWVRQAPGKGLEWIGYINPYNDGTKYNEKFQGRVTISSDKSISTAYMELSSLRSEDTAMYYCARGTYYYGTRVFDYWGQGTLVTVSSASTKGPSVFPLAPSSKSTSGGTAALGCLVKDYFPEPVTVSWNSGALTSGVHTFPAVLQSSGLYSLSSVVTVPSSSLGTQTYICNVNHKPSNTKVDKKVEPKSCDKTHTEVQLVESGGGLVKPGGSLKLSCAASGYTFTSYVMHWVRQAPGKGLEWIGYINPYNDGTKYNEKFQGRVTISSDKSISTAYMELSSLRSEDTAMYYCARGTYYYGTRVFDYWGQGTLVTVSSASTKGPSVFPLAPSSKSTSGGTAALGCLVKDYFPEPVTVSWNSGALTSGVHTFPAVLQSSGLYSLSSVVTVPSSSLGTQTYICNVNHKPSNTKVDKKVEPKSCDKTHTCPPCPAPEFEGGPSVFLFPPKPKDTLMISRTPEVTCVVVAVSHEDPEVKFNWYVDGVEVHNAKTKPCEEQYGSTYRCVSVLTVLHQDWLNGKEYKCKVSNKALPAPIEKTISKAKGQPREPQVYTLPPSREEMTKNQVSLTCLVKGFYPSDIAVEWESNGQPENNYKTTPPVLDSDGSFFLYSKLTVDKSRWQQGNVFSCSVMHEALHNHYTQKSLSLSPGKGGGGSGGGGSGGGGSGGGGSGGGGSGGGGSDKTHTCPPCPAPEFEGGPSVFLFPPKPKDTLMISRTPEVTCVVVAVSHEDPEVKFNWYVDGVEVHNAKTKPCEEQYGSTYRCVSVLTVLHQDWLNGKEYKCKVSNKALPAPIEKTISKAKGQPREPQVYTLPPSREEMTKNQVSLTCLVKGFYPSDIAVEWESNGQPENNYKTTPPVLDSDGSFFLYSKLTVDKSRWQQGNVFSCSVMHEALHNHYTQKSLSLSPGGGGGSGGGGSSYELTQPLSVSVALGQTARITCGGNNIGSKSVHWYQQKPGQAPVLVIYQDKKRPSGIPERFSGSNSGNTATLTISRAQAGDEADYYCQVWDDYIVLFGCGTKLTVLGGSGGSEVQLQQSGPELVKPGASVKISCKTSGYTFTEYTMHWVKQSHGKSLEWIGGISPNIGGTSYNQKFKGKATLTVDKSSSTAYMELRSLTSEDSAVYYCARRGGSFDYWGQGTTLTVSSGGSGGSGGSGGSGGSGGSDIVMTQSPATLSVTPGDRVSLSCRASQSISDYLHWYQQKSHESPRLLIKYASQSISGIPSRFSGSGSGSDFTLSINSVEPEDVGVYYCQNGHSFPLTFGAGTKLELKGGSGGSQVQLVQSGAEVKKPGASVKVSCKASGYTFTNYYMQWVRQAPGQCLEWMGIINPSGGVTSYAQKFQGRVTMTRDTSTSTVYMELSSLRSEDTAVYYCARGSAYYYDFADYWGQGTLVTVSS

SEQ ID NO: 168 - protein, 219 aa, Artificial Sequence; identical to SEQ ID NO: 162
  artificial antibody construct

SEQ ID NO: 169 - protein, 1195 aa, Artificial Sequence
  artificial antibody construct
EVQLVESGGGLVKPGGSLKLSCAASGYTFTSYVMHWVRQAPGKGLEWIGYINPYNDGTKYNEKFQGRVTISSDKSISTAYMELSSLRSEDTAMYYCARGTYYYGTRVFDYWGQGTLVTVSSASTKGPSVFPLAPSSKSTSGGTAALGCLVKDYFPEPVTVSWNSGALTSGVHTFPAVLQSSGLYSLSSVVTVPSSSLGTQTYICNVNHKPSNTKVDKKVEPKSCDKTHTEVQLVESGGGLVKPGGSLKLSCAASGYTFTSYVMHWVRQAPGKGLEWIGYINPYNDGTKYNEKFQGRVTISSDKSISTAYMELSSLRSEDTAMYYCARGTYYYGTRVFDYWGQGTLVTVSSASTKGPSVFPLAPSSKSTSGGTAALGCLVKDYFPEPVTVSWNSGALTSGVHTFPAVLQSSGLYSLSSVVTVPSSSLGTQTYICNVNHKPSNTKVDKKVEPKSCDKTHTCPPCPAPELLGGPSVFLFPPKPKDTLMISRTPEVTCVVVDVSHEDPEVKFNWYVDGVEVHNAKTKPCEEQYNSTYRCVSVLTVLHQDWLNGKEYKCKVSNKALPAPIEKTISKAKGQPREPQVYTLPPSREEMTKNQVSLTCLVKGFYPSDIAVEWESNGQPENNYKTTPPVLDSDGSFFLYSKLTVDKSRWQQGNVFSCSVMHEALHNHYTQKSLSLSPGKGGGGSGGGGSGGGGSGGGGSGGGGSGGGGSDKTHTCPPCPAPELLGGPSVFLFPPKPKDTLMISRTPEVTCVVVDVSHEDPEVKFNWYVDGVEVHNAKTKPCEEQYNSTYRCVSVLTVLHQDWLNGKEYKCKVSNKALPAPIEKTISKAKGQPREPQVYTLPPSREEMTKNQVSLTCLVKGFYPSDIAVEWESNGQPENNYKTTPPVLDSDGSFFLYSKLTVDKSRWQQGNVFSCSVMHEALHNHYTQKSLSLSPGGGGGSGGGGSQVQLVESGGGLVKPGGSLRLSCAASGFTFSSYGMHWVRQAPGKGLEWVAFIRYDGSNKYYADSVKGRFTISRDNSKNTLYLQMNSLRAEDTAVYYCAKDRGLGDGTYFDYWGQGTTVTVSSGGSGGSGGSGGSGGSGGSQSALTQPASVSGSPGQSITISCSGSSSNIGNNAVNWYQQLPGKAPKLLIYYDDLLPSGVSDRFSGSKSGTSAFLAISGLQSEDEADYYCAAWDDSLNGPVFGGGTKLTVL

SEQ ID NO: 170 - protein, 219 aa, Artificial Sequence; identical to SEQ ID NO: 162
  artificial antibody construct

SEQ ID NO: 171 - protein, 1188 aa, Artificial Sequence
  artificial antibody construct
EVQLVESGGGLVKPGGSLKLSCAASGYTFTSYVMHWVRQAPGKGLEWIGYINPYNDGTKYNEKFQGRVTISSDKSISTAYMELSSLRSEDTAMYYCARGTYYYGTRVFDYWGQGTLVTVSSASTKGPSVFPLAPSSKSTSGGTAALGCLVKDYFPEPVTVSWNSGALTSGVHTFPAVLQSSGLYSLSSVVTVPSSSLGTQTYICNVNHKPSNTKVDKKVEPKSCDKTHTEVQLVESGGGLVKPGGSLKLSCAASGYTFTSYVMHWVRQAPGKGLEWIGYINPYNDGTKYNEKFQGRVTISSDKSISTAYMELSSLRSEDTAMYYCARGTYYYGTRVFDYWGQGTLVTVSSASTKGPSVFPLAPSSKSTSGGTAALGCLVKDYFPEPVTVSWNSGALTSGVHTFPAVLQSSGLYSLSSVVTVPSSSLGTQTYICNVNHKPSNTKVDKKVEPKSCDKTHTCPPCPAPELLGGPSVFLFPPKPKDTLMISRTPEVTCVVVDVSHEDPEVKFNWYVDGVEVHNAKTKPCEEQYNSTYRCVSVLTVLHQDWLNGKEYKCKVSNKALPAPIEKTISKAKGQPREPQVYTLPPSREEMTKNQVSLTCLVKGFYPSDIAVEWESNGQPENNYKTTPPVLDSDGSFFLYSKLTVDKSRWQQGNVFSCSVMHEALHNHYTQKSLSLSPGKGGGGSGGGGSGGGGSGGGGSGGGGSGGGGSDKTHTCPPCPAPELLGGPSVFLFPPKPKDTLMISRTPEVTCVVVDVSHEDPEVKFNWYVDGVEVHNAKTKPCEEQYNSTYRCVSVLTVLHQDWLNGKEYKCKVSNKALPAPIEKTISKAKGQPREPQVYTLPPSREEMTKNQVSLTCLVKGFYPSDIAVEWESNGQPENNYKTTPPVLDSDGSFFLYSKLTVDKSRWQQGNVFSCSVMHEALHNHYTQKSLSLSPGGGGGSGGGGSQVQLQQWGAGLLKPSETLSLTCAVYGGSFSGYYWSWIRQPPGKGLEWIGEIDHSGSTNYNPSLKSRVTISVDTSKNQFSLKLSSVTAADTAVYYCARARGPWSFDPWGQGTLVTVSSGGSGGSGGSGGSGGSGGSDIQMTQSPSTLSASVGDRVTITCRASQSISSWLAWYQQKPGKAPKLLIYKASSLESGVPSRFSGSGSGTEFTLTISSLQPDDFATYYCQQYNSYPTFGGGTKVEIKS

SEQ ID NO: 172 - protein, 219 aa, Artificial Sequence; identical to SEQ ID NO: 162
  artificial antibody construct

SEQ ID NO: 173 - protein, 1191 aa, Artificial Sequence
  artificial antibody construct
EVQLVESGGGLVKPGGSLKLSCAASGYTFTSYVMHWVRQAPGKGLEWIGYINPYNDGTKYNEKFQGRVTISSDKSISTAYMELSSLRSEDTAMYYCARGTYYYGTRVFDYWGQGTLVTVSSASTKGPSVFPLAPSSKSTSGGTAALGCLVKDYFPEPVTVSWNSGALTSGVHTFPAVLQSSGLYSLSSVVTVPSSSLGTQTYICNVNHKPSNTKVDKKVEPKSCDKTHTEVQLVESGGGLVKPGGSLKLSCAASGYTFTSYVMHWVRQAPGKGLEWIGYINPYNDGTKYNEKFQGRVTISSDKSISTAYMELSSLRSEDTAMYYCARGTYYYGTRVFDYWGQGTLVTVSSASTKGPSVFPLAPSSKSTSGGTAALGCLVKDYFPEPVTVSWNSGALTSGVHTFPAVLQSSGLYSLSSVVTVPSSSLGTQTYICNVNHKPSNTKVDKKVEPKSCDKTHTCPPCPAPELLGGPSVFLFPPKPKDTLMISRTPEVTCVVVDVSHEDPEVKFNWYVDGVEVHNAKTKPCEEQYNSTYRCVSVLTVLHQDWLNGKEYKCKVSNKALPAPIEKTISKAKGQPREPQVYTLPPSREEMTKNQVSLTCLVKGFYPSDIAVEWESNGQPENNYKTTPPVLDSDGSFFLYSKLTVDKSRWQQGNVFSCSVMHEALHNHYTQKSLSLSPGKGGGGSGGGGSGGGGSGGGGSGGGGSGGGGSDKTHTCPPCPAPELLGGPSVFLFPPKPKDTLMISRTPEVTCVVVDVSHEDPEVKFNWYVDGVEVHNAKTKPCEEQYNSTYRCVSVLTVLHQDWLNGKEYKCKVSNKALPAPIEKTISKAKGQPREPQVYTLPPSREEMTKNQVSLTCLVKGFYPSDIAVEWESNGQPENNYKTTPPVLDSDGSFFLYSKLTVDKSRWQQGNVFSCSVMHEALHNHYTQKSLSLSPGGGGGSGGGGSQVQLQQSGPELVKPGASVKMSCKASGYTFTDYVINWGKQRSGQGLEWIGEIYPGSGTNYYNEKFKAKATLTADKSSNIAYMQLSSLTSEDSAVYFCARRGRYGLYAMDYWGQGTSVTVSSGGSGGSGGSGGSGGSGGSDIQMTQTTSSLSASLGDRVTISCRASQDISNYLNWYQQKPDGTVKLLIYYTSRLHSGVPSRFSGSGSGTDYSLTINNLEQEDIATYFCQQGNTRPWTFGGGTKLEIK

SEQ ID NO: 174 - protein, 219 aa, Artificial Sequence; identical to SEQ ID NO: 162
  artificial antibody construct

SEQ ID NO: 175 - protein, 1187 aa, Artificial Sequence
  artificial antibody construct
EVQLVESGGGLVKPGGSLKLSCAASGYTFTSYVMHWVRQAPGKGLEWIGYINPYNDGTKYNEKFQGRVTISSDKSISTAYMELSSLRSEDTAMYYCARGTYYYGTRVFDYWGQGTLVTVSSASTKGPSVFPLAPSSKSTSGGTAALGCLVKDYFPEPVTVSWNSGALTSGVHTFPAVLQSSGLYSLSSVVTVPSSSLGTQTYICNVNHKPSNTKVDKKVEPKSCDKTHTEVQLVESGGGLVKPGGSLKLSCAASGYTFTSYVMHWVRQAPGKGLEWIGYINPYNDGTKYNEKFQGRVTISSDKSISTAYMELSSLRSEDTAMYYCARGTYYYGTRVFDYWGQGTLVTVSSASTKGPSVFPLAPSSKSTSGGTAALGCLVKDYFPEPVTVSWNSGALTSGVHTFPAVLQSSGLYSLSSVVTVPSSSLGTQTYICNVNHKPSNTKVDKKVEPKSCDKTHTCPPCPAPELLGGPSVFLFPPKPKDTLMISRTPEVTCVVVDVSHEDPEVKFNWYVDGVEVHNAKTKPCEEQYNSTYRCVSVLTVLHQDWLNGKEYKCKVSNKALPAPIEKTISKAKGQPREPQVYTLPPSREEMTKNQVSLTCLVKGFYPSDIAVEWESNGQPENNYKTTPPVLDSDGSFFLYSKLTVDKSRWQQGNVFSCSVMHEALHNHYTQKSLSLSPGKGGGGSGGGGSGGGGSGGGGSGGGGSGGGGSDKTHTCPPCPAPELLGGPSVFLFPPKPKDTLMISRTPEVTCVVVDVSHEDPEVKFNWYVDGVEVHNAKTKPCEEQYNSTYRCVSVLTVLHQDWLNGKEYKCKVSNKALPAPIEKTISKAKGQPREPQVYTLPPSREEMTKNQVSLTCLVKGFYPSDIAVEWESNGQPENNYKTTPPVLDSDGSFFLYSKLTVDKSRWQQGNVFSCSVMHEALHNHYTQKSLSLSPGGGGGSGGGGSEVQLQQSGPELVKPGASVKISCKTSGYTFTEYTMHWVKQSHGKSLEWIGGISPNIGGTSYNQKFKGKATLTVDKSSSTAYMELRSLTSEDSAVYYCARRGGSFDYWGQGTTLTVSSGGSGGSGGSGGSGGSGGSDIVMTQSPATLSVTPGDRVSLSCRASQSISDYLHWYQQKSHESPRLLIKYASQSISGIPSRFSGSGSGSDFTLSINSVEPEDVGVYYCQNGHSFPLTFGAGTKLELK

SEQ ID NO: 176 - protein, 219 aa, Artificial Sequence; identical to SEQ ID NO: 162
  artificial antibody construct

SEQ ID NO: 177 - protein, 679 aa, Artificial Sequence
  artificial antibody construct
EVQLVESGGGLVKPGGSLKLSCAASGYTFTSYVMHWVRQAPGKGLEWIGYINPYNDGTKYNEKFQGRVTISSDKSISTAYMELSSLRSEDTAMYYCARGTYYYGTRVFDYWGQGTLVTVSSASTKGPSVFPLAPSSKSTSGGTAALGCLVKDYFPEPVTVSWNSGALTSGVHTFPAVLQSSGLYSLSSVVTVPSSSLGTQTYICNVNHKPSNTKVDKKVEPKSCDKTHTEVQLVESGGGLVKPGGSLKLSCAASGYTFTSYVMHWVRQAPGKGLEWIGYINPYNDGTKYNEKFQGRVTISSDKSISTAYMELSSLRSEDTAMYYCARGTYYYGTRVFDYWGQGTLVTVSSASTKGPSVFPLAPSSKSTSGGTAALGCLVKDYFPEPVTVSWNSGALTSGVHTFPAVLQSSGLYSLSSVVTVPSSSLGTQTYICNVNHKPSNTKVDKKVEPKSCDKTHTCPPCPAPEFEGGPSVFLFPPKPKDTLMISRTPEVTCVVVAVSHEDPEVKFNWYVDGVEVHNAKTKPREEQYGSTYRVVSVLTVLHQDWLNGKEYKCKVSNKALPAPIEKTISKAKGQPREPQVYTLPPSREEMTKNQVSLWCLVKGFYPSDIAVEWESNGQPENNYKTTPPVLDSDGSFFLYSKLTVDKSRWQQGNVFSCSVMHEALHNHYTQKSLSLSPG

SEQ ID NO: 178 - protein, 219 aa, Artificial Sequence; identical to SEQ ID NO: 162
  artificial antibody construct

SEQ ID NO: 179 - protein, 713 aa, Artificial Sequence
  artificial antibody construct
SYELTQPLSVSVALGQTARITCGGNNIGSKSVHWYQQKPGQAPVLVIYQDKKRPSGIPERFSGSNSGNTATLTISRAQAGDEADYYCQVWDDYIVLFGCGTKLTVLGGSGGSQVQLVESGGGLVKPGGSLRLSCAASGFTFSSYGMHWVRQAPGKGLEWVAFIRYDGSNKYYADSVKGRFTISRDNSKNTLYLQMNSLRAEDTAVYYCAKDRGLGDGTYFDYWGQGTTVTVSSGGSGGSGGSGGSGGSGGSQSALTQPASVSGSPGQSITISCSGSSSNIGNNAVNWYQQLPGKAPKLLIYYDDLLPSGVSDRFSGSKSGTSAFLAISGLQSEDEADYYCAAWDDSLNGPVFGGGTKLTVLGGSGGSQVQLVQSGAEVKKPGASVKVSCKASGYTFTNYYMQWVRQAPGQCLEWMGIINPSGGVTSYAQKFQGRVTMTRDTSTSTVYMELSSLRSEDTAVYYCARGSAYYYDFADYWGQGTLVTVSSDKTHTCPPCPAPEFEGGPSVFLFPPKPKDTLMISRTPEVTCVVVAVSHEDPEVKFNWYVDGVEVHNAKTKPREEQYGSTYRVVSVLTVLHQDWLNGKEYKCKVSNKALPAPIEKTISKAKGQPREPQVYTLPPSREEMTKNQVSLSCAVKGFYPSDIAVEWESNGQPENNYKTTPPVLDSDGSFFLVSKLTVDKSRWQQGNVFSCSVMHEALHNHYTQKSLSLSPG

SEQ ID NO: 180 - protein, 679 aa, Artificial Sequence; identical to SEQ ID NO: 177
  artificial antibody construct

SEQ ID NO: 181 - protein, 219 aa, Artificial Sequence; identical to SEQ ID NO: 162
  artificial antibody construct

SEQ ID NO: 182 - protein, 705 aa, Artificial Sequence
  artificial antibody construct
SYELTQPLSVSVALGQTARITCGGNNIGSKSVHWYQQKPGQAPVLVIYQDKKRPSGIPERFSGSNSGNTATLTISRAQAGDEADYYCQVWDDYIVLFGCGTKLTVLGGSGGSQVQLQQWGAGLLKPSETLSLTCAVYGGSFSGYYWSWIRQPPGKGLEWIGEIDHSGSTNYNPSLKSRVTISVDTSKNQFSLKLSSVTAADTAVYYCARARGPWSFDPWGQGTLVTVSSGGSGGSGGSGGSGGSGGSDIQMTQSPSTLSASVGDRVTITCRASQSISSWLAWYQQKPGKAPKLLIYKASSLESGVPSRFSGSGSGTEFTLTISSLQPDDFATYYCQQYNSYPTFGGGTKVEIKGGSGGSQVQLVQSGAEVKKPGASVKVSCKASGYTFTNYYMQWVRQAPGQCLEWMGIINPSGGVTSYAQKFQGRVTMTRDTSTSTVYMELSSLRSEDTAVYYCARGSAYYYDFADYWGQGTLVTVSSDKTHTCPPCPAPEFEGGPSVFLFPPKPKDTLMISRTPEVTCVVVAVSHEDPEVKFNWYVDGVEVHNAKTKPREEQYGSTYRVVSVLTVLHQDWLNGKEYKCKVSNKALPAPIEKTISKAKGQPREPQVYTLPPSREEMTKNQVSLSCAVKGFYPSDIAVEWESNGQPENNYKTTPPVLDSDGSFFLVSKLTVDKSRWQQGNVFSCSVMHEALHNHYTQKSLSLSPG

SEQ ID NO: 183 - protein, 679 aa, Artificial Sequence; identical to SEQ ID NO: 177
  artificial antibody construct

SEQ ID NO: 184 - protein, 219 aa, Artificial Sequence; identical to SEQ ID NO: 162
  artificial antibody construct

SEQ ID NO: 185 - protein, 709 aa, Artificial Sequence
  artificial antibody construct
SYELTQPLSVSVALGQTARITCGGNNIGSKSVHWYQQKPGQAPVLVIYQDKKRPSGIPERFSGSNSGNTATLTISRAQAGDEADYYCQVWDDYIVLFGCGTKLTVLGGSGGSQVQLQQSGPELVKPGASVKMSCKASGYTFTDYVINWGKQRSGQGLEWIGEIYPGSGTNYYNEKFKAKATLTADKSSNIAYMQLSSLTSEDSAVYFCARRGRYGLYAMDYWGQGTSVTVSSGGSGGSGGSGGSGGSGGSDIQMTQTTSSLSASLGDRVTISCRASQDISNYLNWYQQKPDGTVKLLIYYTSRLHSGVPSRFSGSGSGTDYSLTINNLEQEDIATYFCQQGNTRPWTFGGGTKLEIKGGSGGSQVQLVQSGAEVKKPGASVKVSCKASGYTFTNYYMQWVRQAPGQCLEWMGIINPSGGVTSYAQKFQGRVTMTRDTSTSTVYMELSSLRSEDTAVYYCARGSAYYYDFADYWGQGTLVTVSSDKTHTCPPCPAPEFEGGPSVFLFPPKPKDTLMISRTPEVTCVVVAVSHEDPEVKFNWYVDGVEVHNAKTKPREEQYGSTYRVVSVLTVLHQDWLNGKEYKCKVSNKALPAPIEKTISKAKGQPREPQVYTLPPSREEMTKNQVSLSCAVKGFYPSDIAVEWESNGQPENNYKTTPPVLDSDGSFFLVSKLTVDKSRWQQGNVFSCSVMHEALHNHYTQKSLSLSPG

SEQ ID NO: 186 - protein, 679 aa, Artificial Sequence; identical to SEQ ID NO: 177
  artificial antibody construct

SEQ ID NO: 187 - protein, 219 aa, Artificial Sequence; identical to SEQ ID NO: 162
  artificial antibody construct

SEQ ID NO: 188 - protein, 705 aa, Artificial Sequence
  artificial antibody construct
SYELTQPLSVSVALGQTARITCGGNNIGSKSVHWYQQKPGQAPVLVIYQDKKRPSGIPERFSGSNSGNTATLTISRAQAGDEADYYCQVWDDYIVLFGCGTKLTVLGGSGGSEVQLQQSGPELVKPGASVKISCKTSGYTFTEYTMHWVKQSHGKSLEWIGGISPNIGGTSYNQKFKGKATLTVDKSSSTAYMELRSLTSEDSAVYYCARRGGSFDYWGQGTTLTVSSGGSGGSGGSGGSGGSGGSDIVMTQSPATLSVTPGDRVSLSCRASQSISDYLHWYQQKSHESPRLLIKYASQSISGIPSRFSGSGSGSDFTLSINSVEPEDVGVYYCQNGHSFPLTFGAGTKLELKGGSGGSQVQLVQSGAEVKKPGASVKVSCKASGYTFTNYYMQWVRQAPGQCLEWMGIINPSGGVTSYAQKFQGRVTMTRDTSTSTVYMELSSLRSEDTAVYYCARGSAYYYDFADYWGQGTLVTVSSDKTHTCPPCPAPEFEGGPSVFLFPPKPKDTLMISRTPEVTCVVVAVSHEDPEVKFNWYVDGVEVHNAKTKPREEQYGSTYRVVSVLTVLHQDWLNGKEYKCKVSNKALPAPIEKTISKAKGQPREPQVYTLPPSREEMTKNQVSLSCAVKGFYPSDIAVEWESNGQPENNYKTTPPVLDSDGSFFLVSKLTVDKSRWQQGNVFSCSVMHEALHNHYTQKSLSLSPG

SEQ ID NO: 189 - protein, 677 aa, Artificial Sequence
  artificial antibody construct
EVQLQESGPGLVKPSETLSLTCTVSGGSVSSGSYYWSWIRQPPGKGLEWIGYIYYSGSTNYNPSLKSRVTISVDTSKNQFSLKLSSVTAADTAVYYCARNPISIPAFDIWGQGTMVTVSSASTKGPSVFPLAPSSKSTSGGTAALGCLVKDYFPEPVTVSWNSGALTSGVHTFPAVLQSSGLYSLSSVVTVPSSSLGTQTYICNVNHKPSNTKVDKKVEPKSCDKTHTQVQLQESGPGLVKPSETLSLTCTVSGGSVSSGSYYWSWIRQPPGKGLEWIGYIYYSGSTNYNPSLKSRVTISVDTSKNQFSLKLSSVTAADTAVYYCARNPISIPAFDIWGQGTMVTVSSASTKGPSVFPLAPSSKSTSGGTAALGCLVKDYFPEPVTVSWNSGALTSGVHTFPAVLQSSGLYSLSSVVTVPSSSLGTQTYICNVNHKPSNTKVDKKVEPKSCDKTHTCPPCPAPEFEGGPSVFLFPPKPKDTLMISRTPEVTCVVVAVSHEDPEVKFNWYVDGVEVHNAKTKPREEQYGSTYRVVSVLTVLHQDWLNGKEYKCKVSNKALPAPIEKTISKAKGQPREPQVYTLPPSREEMTKNQVSLWCLVKGFYPSDIAVEWESNGQPENNYKTTPPVLDSDGSFFLYSKLTVDKSRWQQGNVFSCSVMHEALHNHYTQKSLSLSPG

SEQ ID NO: 190 - protein, 214 aa, Artificial Sequence
  artificial antibody construct
QPVLTQPPSVSVAPGKTARITCGGNNIGSKSVHWYQQKPGQAPVLVIYYDSDRPSGIPERFSGSNSGNTATLTISRVEAGDEADYYCQVWDTSSDHVLFGGGTKLTVLGQPKAAPSVTLFPPSSEELQANKATLVCLISDFYPGAVTVAWKADSSPVKAGVETTTPSKQSNNKYAASSYLSLTPEQWKSHRSYSCQVTHEGSTVEKTVAPTECS

SEQ ID NO: 191 - protein, 713 aa, Artificial Sequence; identical to SEQ ID NO: 179
  artificial antibody construct

SEQ ID NO: 192 - protein, 677 aa, Artificial Sequence; identical to SEQ ID NO: 189
  artificial antibody construct

SEQ ID NO: 193 - protein, 214 aa, Artificial Sequence; identical to SEQ ID NO: 190
  artificial antibody construct

SEQ ID NO: 194 - protein, 705 aa, Artificial Sequence; identical to SEQ ID NO: 182
  artificial antibody construct

SEQ ID NO: 195 - protein, 677 aa, Artificial Sequence; identical to SEQ ID NO: 189
  artificial antibody construct

SEQ ID NO: 196 - protein, 214 aa, Artificial Sequence; identical to SEQ ID NO: 190
  artificial antibody construct

SEQ ID NO: 197 - protein, 709 aa, Artificial Sequence; identical to SEQ ID NO: 185
  artificial antibody construct

SEQ ID NO: 198 - protein, 677 aa, Artificial Sequence; identical to SEQ ID NO: 189
  artificial antibody construct

SEQ ID NO: 199 - protein, 214 aa, Artificial Sequence; identical to SEQ ID NO: 190
  artificial antibody construct

SEQ ID NO: 200 - protein, 705 aa, Artificial Sequence; identical to SEQ ID NO: 188
  artificial antibody construct

SEQ ID NO: 201 - protein, 679 aa, Artificial Sequence
  artificial antibody construct
EVQLVESGGGLVKPGGSLKLSCAASGYTFTSYVMHWVRQAPGKGLEWIGYINPYNDGTKYNEKFQGRVTISSDKSISTAYMELSSLRSEDTAMYYCARGTYYYGTRVFDYWGQGTLVTVSSASTKGPSVFPLAPSSKSTSGGTAALGCLVKDYFPEPVTVSWNSGALTSGVHTFPAVLQSSGLYSLSSVVTVPSSSLGTQTYICNVNHKPSNTKVDKKVEPKSCDKTHTEVQLVESGGGLVKPGGSLKLSCAASGYTFTSYVMHWVRQAPGKGLEWIGYINPYNDGTKYNEKFQGRVTISSDKSISTAYMELSSLRSEDTAMYYCARGTYYYGTRVFDYWGQGTLVTVSSASTKGPSVFPLAPSSKSTSGGTAALGCLVKDYFPEPVTVSWNSGALTSGVHTFPAVLQSSGLYSLSSVVTVPSSSLGTQTYICNVNHKPSNTKVDKKVEPKSCDKTHTCPPCPAPELLGGPSVFLFPPKPKDTLMISRTPEVTCVVVDVSHEDPEVKFNWYVDGVEVHNAKTKPREEQYNSTYRVVSVLTVLHQDWLNGKEYKCKVSNKALPAPIEKTISKAKGQPREPQVYTLPPSREEMTKNQVSLWCLVKGFYPSDIAVEWESNGQPENNYKTTPPVLDSDGSFFLYSKLTVDKSRWQQGNVFSCSVMHEALHNHYTQKSLSLSPG

SEQ ID NO: 202 - protein, 219 aa, Artificial Sequence; identical to SEQ ID NO: 162
  artificial antibody construct

SEQ ID NO: 203 - protein, 475 aa, Artificial Sequence
  artificial antibody construct
EVQLVESGGGLVKPGGSLRLSCAASGFTFSSYGMHWVRQAPGKGLEWVAFIRYDGSNKYYADSVKGRFTISRDNSKNTLYLQMNSLRAEDTAVYYCAKDRGLGDGTYFDYWGQGTTVTVSSGGSGGSGGSGGSGGSGGSQSALTQPASVSGSPGQSITISCSGSSSNIGNNAVNWYQQLPGKAPKLLIYYDDLLPSGVSDRFSGSKSGTSAFLAISGLQSEDEADYYCAAWDDSLNGPVFGGGTKLTVLDKTHTCPPCPAPELLGGPSVFLFPPKPKDTLMISRTPEVTCVVVDVSHEDPEVKFNWYVDGVEVHNAKTKPREEQYNSTYRVVSVLTVLHQDWLNGKEYKCKVSNKALPAPIEKTISKAKGQPREPQVYTLPPSREEMTKNQVSLSCAVKGFYPSDIAVEWESNGQPENNYKTTPPVLDSDGSFFLVSKLTVDKSRWQQGNVFSCSVMHEALHNHYTQKSLSLSPG

SEQ ID NO: 204 - protein, 679 aa, Artificial Sequence; identical to SEQ ID NO: 201
  artificial antibody construct

SEQ ID NO: 205 - protein, 219 aa, Artificial Sequence; identical to SEQ ID NO: 162
  artificial antibody construct

SEQ ID NO: 206 - protein, 467 aa, Artificial Sequence
  artificial antibody construct
EVQLQQWGAGLLKPSETLSLTCAVYGGSFSGYYWSWIRQPPGKGLEWIGEIDHSGSTNYNPSLKSRVTISVDTSKNQFSLKLSSVTAADTAVYYCARARGPWSFDPWGQGTLVTVSSGGSGGSGGSGGSGGSGGSDIQMTQSPSTLSASVGDRVTITCRASQSISSWLAWYQQKPGKAPKLLIYKASSLESGVPSRFSGSGSGTEFTLTISSLQPDDFATYYCQQYNSYPTFGGGTKVEIKDKTHTCPPCPAPELLGGPSVFLFPPKPKDTLMISRTPEVTCVVVDVSHEDPEVKFNWYVDGVEVHNAKTKPREEQYNSTYRVVSVLTVLHQDWLNGKEYKCKVSNKALPAPIEKTISKAKGQPREPQVYTLPPSREEMTKNQVSLSCAVKGFYPSDIAVEWESNGQPENNYKTTPPVLDSDGSFFLVSKLTVDKSRWQQGNVFSCSVMHEALHNHYTQKSLSLSPG

SEQ ID NO: 207 - protein, 679 aa, Artificial Sequence; identical to SEQ ID NO: 201
  artificial antibody construct

SEQ ID NO: 208 - protein, 219 aa, Artificial Sequence; identical to SEQ ID NO: 162
  artificial antibody construct

SEQ ID NO: 209 - protein, 471 aa, Artificial Sequence
  artificial antibody construct
EVQLQQSGPELVKPGASVKMSCKASGYTFTDYVINWGKQRSGQGLEWIGEIYPGSGTNYYNEKFKAKATLTADKSSNIAYMQLSSLTSEDSAVYFCARRGRYGLYAMDYWGQGTSVTVSSGGSGGSGGSGGSGGSGGSDIQMTQTTSSLSASLGDRVTISCRASQDISNYLNWYQQKPDGTVKLLIYYTSRLHSGVPSRFSGSGSGTDYSLTINNLEQEDIATYFCQQGNTRPWTFGGGTKLEIKDKTHTCPPCPAPELLGGPSVFLFPPKPKDTLMISRTPEVTCVVVDVSHEDPEVKFNWYVDGVEVHNAKTKPREEQYNSTYRVVSVLTVLHQDWLNGKEYKCKVSNKALPAPIEKTISKAKGQPREPQVYTLPPSREEMTKNQVSLSCAVKGFYPSDIAVEWESNGQPENNYKTTPPVLDSDGSFFLVSKLTVDKSRWQQGNVFSCSVMHEALHNHYTQKSLSLSPG

SEQ ID NO: 210 - protein, 679 aa, Artificial Sequence; identical to SEQ ID NO: 201
  artificial antibody construct

SEQ ID NO: 211 - protein, 219 aa, Artificial Sequence; identical to SEQ ID NO: 162
  artificial antibody construct

SEQ ID NO: 212 - protein, 467 aa, Artificial Sequence
  artificial antibody construct
EVQLQQSGPELVKPGASVKISCKTSGYTFTEYTMHWVKQSHGKSLEWIGGISPNIGGTSYNQKFKGKATLTVDKSSSTAYMELRSLTSEDSAVYYCARRGGSFDYWGQGTTLTVSSGGSGGSGGSGGSGGSGGSDIVMTQSPATLSVTPGDRVSLSCRASQSISDYLHWYQQKSHESPRLLIKYASQSISGIPSRFSGSGSGSDFTLSINSVEPEDVGVYYCQNGHSFPLTFGAGTKLELKDKTHTCPPCPAPELLGGPSVFLFPPKPKDTLMISRTPEVTCVVVDVSHEDPEVKFNWYVDGVEVHNAKTKPREEQYNSTYRVVSVLTVLHQDWLNGKEYKCKVSNKALPAPIEKTISKAKGQPREPQVYTLPPSREEMTKNQVSLSCAVKGFYPSDIAVEWESNGQPENNYKTTPPVLDSDGSFFLVSKLTVDKSRWQQGNVFSCSVMHEALHNHYTQKSLSLSPG

SEQ ID NO: 213 - protein, 679 aa, Artificial Sequence; identical to SEQ ID NO: 177
  artificial antibody construct

SEQ ID NO: 214 - protein, 219 aa, Artificial Sequence; identical to SEQ ID NO: 162
  artificial antibody construct

SEQ ID NO: 215 - protein, 716 aa, Artificial Sequence
  artificial antibody construct
DIVLTQSPASLAVSLGQRATISCKASQSVDFDGDSFMNWYQQKPGQPPKLLIYTTSNLESGIPARFSASGSGTDFTLNIHPVEEEDTATYYCQQSNEDPYTFGGGTKLELKGGSGGSQVQLVESGGGLVKPGGSLRLSCAASGFTFSSYGMHWVRQAPGKGLEWVAFIRYDGSNKYYADSVKGRFTISRDNSKNTLYLQMNSLRAEDTAVYYCAKDRGLGDGTYFDYWGQGTTVTVSSGGSGGSGGSGGSGGSGGSQSALTQPASVSGSPGQSITISCSGSSSNIGNNAVNWYQQLPGKAPKLLIYYDDLLPSGVSDRFSGSKSGTSAFLAISGLQSEDEADYYCAAWDDSLNGPVFGGGTKLTVLGGSGGSQVTLKESGPGILQPSQTLSLTCSFSGFSLRTSGMGVGWIRQPSGKGLEWLAHIWWDDDKRYNPALKSRLTISKDTSSNQVFLKIASVDTADTATYYCAQINPAWFAYWGQGTLVTVSADKTHTCPPCPAPEFEGGPSVFLFPPKPKDTLMISRTPEVTCVVVAVSHEDPEVKFNWYVDGVEVHNAKTKPREEQYGSTYRVVSVLTVLHQDWLNGKEYKCKVSNKALPAPIEKTISKAKGQPREPQVYTLPPSREEMTKNQVSLSCAVKGFYPSDIAVEWESNGQPENNYKTTPPVLDSDGSFFLVSKLTVDKSRWQQGNVFSCSVMHEALHNHYTQKSLSLSPG

SEQ ID NO: 216 - protein, 679 aa, Artificial Sequence; identical to SEQ ID NO: 177
  artificial antibody construct

SEQ ID NO: 217 - protein, 219 aa, Artificial Sequence; identical to SEQ ID NO: 162
  artificial antibody construct

SEQ ID NO: 218 - protein, 708 aa, Artificial Sequence
  artificial antibody construct
DIVLTQSPASLAVSLGQRATISCKASQSVDFDGDSFMNWYQQKPGQPPKLLIYTTSNLESGIPARFSASGSGTDFTLNIHPVEEEDTATYYCQQSNEDPYTFGGGTKLELKGGSGGSQVQLQQWGAGLLKPSETLSLTCAVYGGSFSGYYWSWIRQPPGKGLEWIGEIDHSGSTNYNPSLKSRVTISVDTSKNQFSLKLSSVTAADTAVYYCARARGPWSFDPWGQGTLVTVSSGGSGGSGGSGGSGGSGGSDIQMTQSPSTLSASVGDRVTITCRASQSISSWLAWYQQKPGKAPKLLIYKASSLESGVPSRFSGSGSGTEFTLTISSLQPDDFATYYCQQYNSYPTFGGGTKVEIKGGSGGSQVTLKESGPGILQPSQTLSLTCSFSGFSLRTSGMGVGWIRQPSGKGLEWLAHIWWDDDKRYNPALKSRLTISKDTSSNQVFLKIASVDTADTATYYCAQINPAWFAYWGQGTLVTVSADKTHTCPPCPAPEFEGGPSVFLFPPKPKDTLMISRTPEVTCVVVAVSHEDPEVKFNWYVDGVEVHNAKTKPREEQYGSTYRVVSVLTVLHQDWLNGKEYKCKVSNKALPAPIEKTISKAKGQPREPQVYTLPPSREEMTKNQVSLSCAVKGFYPSDIAVEWESNGQPENNYKTTPPVLDSDGSFFLVSKLTVDKSRWQQGNVFSCSVMHEALHNHYTQKSLSLSPG

SEQ ID NO: 219 - protein, 679 aa, Artificial Sequence; identical to SEQ ID NO: 177
  artificial antibody construct

SEQ ID NO: 220 - protein, 219 aa, Artificial Sequence; identical to SEQ ID NO: 162
  artificial antibody construct

SEQ ID NO: 221 - protein, 712 aa, Artificial Sequence
  artificial antibody construct
DIVLTQSPASLAVSLGQRATISCKASQSVDFDGDSFMNWYQQKPGQPPKLLIYTTSNLESGIPARFSASGSGTDFTLNIHPVEEEDTATYYCQQSNEDPYTFGGGTKLELKGGSGGSQVQLQQSGPELVKPGASVKMSCKASGYTFTDYVINWGKQRSGQGLEWIGEIYPGSGTNYYNEKFKAKATLTADKSSNIAYMQLSSLTSEDSAVYFCARRGRYGLYAMDYWGQGTSVTVSSGGSGGSGGSGGSGGSGGSDIQMTQTTSSLSASLGDRVTISCRASQDISNYLNWYQQKPDGTVKLLIYYTSRLHSGVPSRFSGSGSGTDYSLTINNLEQEDIATYFCQQGNTRPWTFGGGTKLEIKGGSGGSQVTLKESGPGILQPSQTLSLTCSFSGFSLRTSGMGVGWIRQPSGKGLEWLAHIWWDDDKRYNPALKSRLTISKDTSSNQVFLKIASVDTADTATYYCAQINPAWFAYWGQGTLVTVSADKTHTCPPCPAPEFEGGPSVFLFPPKPKDTLMISRTPEVTCVVVAVSHEDPEVKFNWYVDGVEVHNAKTKPREEQYGSTYRVVSVLTVLHQDWLNGKEYKCKVSNKALPAPIEKTISKAKGQPREPQVYTLPPSREEMTKNQVSLSCAVKGFYPSDIAVEWESNGQPENNYKTTPPVLDSDGSFFLVSKLTVDKSRWQQGNVFSCSVMHEALHNHYTQKSLSLSPG

SEQ ID NO: 222 - protein, 679 aa, Artificial Sequence; identical to SEQ ID NO: 177
  artificial antibody construct

SEQ ID NO: 223 - protein, 219 aa, Artificial Sequence; identical to SEQ ID NO: 162
  artificial antibody construct

SEQ ID NO: 224 - protein, 708 aa, Artificial Sequence
  artificial antibody construct
DIVLTQSPASLAVSLGQRATISCKASQSVDFDGDSFMNWYQQKPGQPPKLLIYTTSNLESGIPARFSASGSGTDFTLNIHPVEEEDTATYYCQQSNEDPYTFGGGTKLELKGGSGGSEVQLQQSGPELVKPGASVKISCKTSGYTFTEYTMHWVKQSHGKSLEWIGGISPNIGGTSYNQKFKGKATLTVDKSSSTAYMELRSLTSEDSAVYYCARRGGSFDYWGQGTTLTVSSGGSGGSGGSGGSGGSGGSDIVMTQSPATLSVTPGDRVSLSCRASQSISDYLHWYQQKSHESPRLLIKYASQSISGIPSRFSGSGSGSDFTLSINSVEPEDVGVYYCQNGHSFPLTFGAGTKLELKGGSGGSQVTLKESGPGILQPSQTLSLTCSFSGFSLRTSGMGVGWIRQPSGKGLEWLAHIWWDDDKRYNPALKSRLTISKDTSSNQVFLKIASVDTADTATYYCAQINPAWFAYWGQGTLVTVSADKTHTCPPCPAPEFEGGPSVFLFPPKPKDTLMISRTPEVTCVVVAVSHEDPEVKFNWYVDGVEVHNAKTKPREEQYGSTYRVVSVLTVLHQDWLNGKEYKCKVSNKALPAPIEKTISKAKGQPREPQVYTLPPSREEMTKNQVSLSCAVKGFYPSDIAVEWESNGQPENNYKTTPPVLDSDGSFFLVSKLTVDKSRWQQGNVFSCSVMHEALHNHYTQKSLSLSPG

SEQ ID NO: 225 - protein, 450 aa, Artificial Sequence
  artificial antibody construct
EVQLVESGGGLVKPGGSLKLSCAASGYTFTSYVMHWVRQAPGKGLEWIGYINPYNDGTKYNEKFQGRVTISSDKSISTAYMELSSLRSEDTAMYYCARGTYYYGTRVFDYWGQGTLVTVSSASTKGPSVFPLAPSSKSTSGGTAALGCLVKDYFPEPVTVSWNSGALTSGVHTFPAVLQSSGLYSLSSVVTVPSSSLGTQTYICNVNHKPSNTKVDKKVEPKSCDKTHTCPPCPAPEFEGGPSVFLFPPKPKDTLMISRTPEVTCVVVAVSHEDPEVKFNWYVDGVEVHNAKTKPREEQYGSTYRVVSVLTVLHQDWLNGKEYKCKVSNKALPAPIEKTISKAKGQPREPQVYTLPPSREEMTKNQVSLWCLVKGFYPSDIAVEWESNGQPENNYKTTPPVLDSDGSFFLYSKLTVDKSRWQQGNVFSCSVMHEALHNHYTQKSLSLSPG

SEQ ID NO: 226 - protein, 219 aa, Artificial Sequence; identical to SEQ ID NO: 162
  artificial antibody construct

SEQ ID NO: 227 - protein, 713 aa, Artificial Sequence; identical to SEQ ID NO: 179
  artificial antibody construct

SEQ ID NO: 228 - protein, 450 aa, Artificial Sequence; identical to SEQ ID NO: 225
  artificial antibody construct

SEQ ID NO: 229 - protein, 219 aa, Artificial Sequence; identical to SEQ ID NO: 162
  artificial antibody construct

SEQ ID NO: 230 - protein, 705 aa, Artificial Sequence; identical to SEQ ID NO: 182
  artificial antibody construct

SEQ ID NO: 231 - protein, 450 aa, Artificial Sequence; identical to SEQ ID NO: 225
  artificial antibody construct

SEQ ID NO: 232 - protein, 219 aa, Artificial Sequence; identical to SEQ ID NO: 162
  artificial antibody construct

SEQ ID NO: 233 - protein, 709 aa, Artificial Sequence; identical to SEQ ID NO: 185
  artificial antibody construct

SEQ ID NO: 234 - protein, 450 aa, Artificial Sequence; identical to SEQ ID NO: 225
  artificial antibody construct

SEQ ID NO: 235 - protein, 219 aa, Artificial Sequence; identical to SEQ ID NO: 162
  artificial antibody construct

SEQ ID NO: 236 - protein, 705 aa, Artificial Sequence; identical to SEQ ID NO: 188
  artificial antibody construct

SEQ ID NO: 237 - protein, 729 aa, Artificial Sequence
  artificial antibody construct
EVQLVESGGGLVKPGGSLRLSCAASGFTFSSYGMHWVRQAPGKGLEWVAFIRYDGSNKYYADSVKGRFTISRDNSKNTLYLQMNSLRAEDTAVYYCAKDRGLGDGTYFDYWGQGTTVTVSSGGSGGSGGSDIVMTQSPATLSLSPGERATLSCRSSKSLQNVNGNTYLYWFQQKPGQSPQLLIYRMSNLNSGVPDRFSGSGSGTEFTLTISSLEPEDFAVYYCMQHLEYPITFGAGTKLEIKGGSGGSGGSGGSGGSGGSGGSEVQLVESGGGLVKPGGSLKLSCAASGYTFTSYVMHWVRQAPGKGLEWIGYINPYNDGTKYNEKFQGRVTISSDKSISTAYMELSSLRSEDTAMYYCARGTYYYGTRVFDYWGQGTLVTVSSGGSGGSGGSQSALTQPASVSGSPGQSITISCSGSSSNIGNNAVNWYQQLPGKAPKLLIYYDDLLPSGVSDRFSGSKSGTSAFLAISGLQSEDEADYYCAAWDDSLNGPVFGGGTKLTVLDKTHTCPPCPAPEFEGGPSVFLFPPKPKDTLMISRTPEVTCVVVAVSHEDPEVKFNWYVDGVEVHNAKTKPREEQYGSTYRVVSVLTVLHQDWLNGKEYKCKVSNKALPAPIEKTISKAKGQPREPQVYTLPPSREEMTKNQVSLWCLVKGFYPSDIAVEWESNGQPENNYKTTPPVLDSDGSFFLYSKLTVDKSRWQQGNVFSCSVMHEALHNHYTQKSLSLSPG

SEQ ID NO: 238 - protein, 724 aa, Artificial Sequence
  artificial antibody construct
EVQLVQSGAEVKKPGASVKVSCKASGYTFTNYYMQWVRQAPGQCLEWMGIINPSGGVTSYAQKFQGRVTMTRDTSTSTVYMELSSLRSEDTAVYYCARGSAYYYDFADYWGQGTLVTVSSGGSGGSGGSDIVMTQSPATLSLSPGERATLSCRSSKSLQNVNGNTYLYWFQQKPGQSPQLLIYRMSNLNSGVPDRFSGSGSGTEFTLTISSLEPEDFAVYYCMQHLEYPITFGAGTKLEIKGGSGGSGGSGGSGGSGGSGGSEVQLVESGGGLVKPGGSLKLSCAASGYTFTSYVMHWVRQAPGKGLEWIGYINPYNDGTKYNEKFQGRVTISSDKSISTAYMELSSLRSEDTAMYYCARGTYYYGTRVFDYWGQGTLVTVSSGGSGGSGGSSYELTQPLSVSVALGQTARITCGGNNIGSKSVHWYQQKPGQAPVLVIYQDKKRPSGIPERFSGSNSGNTATLTISRAQAGDEADYYCQVWDDYIVLFGCGTKLTVLDKTHTCPPCPAPEFEGGPSVFLFPPKPKDTLMISRTPEVTCVVVAVSHEDPEVKFNWYVDGVEVHNAKTKPREEQYGSTYRVVSVLTVLHQDWLNGKEYKCKVSNKALPAPIEKTISKAKGQPREPQVYTLPPSREEMTKNQVSLSCAVKGFYPSDIAVEWESNGQPENNYKTTPPVLDSDGSFFLVSKLTVDKSRWQQGNVFSCSVMHEALHNHYTQKSLSLSPG

SEQ ID NO: 239 - protein, 721 aa, Artificial Sequence
  artificial antibody construct
EVQLQQWGAGLLKPSETLSLTCAVYGGSFSGYYWSWIRQPPGKGLEWIGEIDHSGSTNYNPSLKSRVTISVDTSKNQFSLKLSSVTAADTAVYYCARARGPWSFDPWGQGTLVTVSSGGSGGSGGSDIVMTQSPATLSLSPGERATLSCRSSKSLQNVNGNTYLYWFQQKPGQSPQLLIYRMSNLNSGVPDRFSGSGSGTEFTLTISSLEPEDFAVYYCMQHLEYPITFGAGTKLEIKGGSGGSGGSGGSGGSGGSGGSEVQLVESGGGLVKPGGSLKLSCAASGYTFTSYVMHWVRQAPGKGLEWIGYINPYNDGTKYNEKFQGRVTISSDKSISTAYMELSSLRSEDTAMYYCARGTYYYGTRVFDYWGQGTLVTVSSGGSGGSGGSDIQMTQSPSTLSASVGDRVTITCRASQSISSWLAWYQQKPGKAPKLLIYKASSLESGVPSRFSGSGSGTEFTLTISSLQPDDFATYYCQQYNSYPTFGGGTKVEIKDKTHTCPPCPAPEFEGGPSVFLFPPKPKDTLMISRTPEVTCVVVAVSHEDPEVKFNWYVDGVEVHNAKTKPREEQYGSTYRVVSVLTVLHQDWLNGKEYKCKVSNKALPAPIEKTISKAKGQPREPQVYTLPPSREEMTKNQVSLWCLVKGFYPSDIAVEWESNGQPENNYKTTPPVLDSDGSFFLYSKLTVDKSRWQQGNVFSCSVMHEALHNHYTQKSLSLSPG

SEQ ID NO: 240 - protein, 724 aa, Artificial Sequence; identical to SEQ ID NO: 238
  artificial antibody construct

SEQ ID NO: 241 - protein, 725 aa, Artificial Sequence
  artificial antibody construct
EVQLQQSGPELVKPGASVKMSCKASGYTFTDYVINWGKQRSGQGLEWIGEIYPGSGTNYYNEKFKAKATLTADKSSNIAYMQLSSLTSEDSAVYFCARRGRYGLYAMDYWGQGTSVTVSSGGSGGSGGSDIVMTQSPATLSLSPGERATLSCRSSKSLQNVNGNTYLYWFQQKPGQSPQLLIYRMSNLNSGVPDRFSGSGSGTEFTLTISSLEPEDFAVYYCMQHLEYPITFGAGTKLEIKGGSGGSGGSGGSGGSGGSGGSEVQLVESGGGLVKPGGSLKLSCAASGYTFTSYVMHWVRQAPGKGLEWIGYINPYNDGTKYNEKFQGRVTISSDKSISTAYMELSSLRSEDTAMYYCARGTYYYGTRVFDYWGQGTLVTVSSGGSGGSGGSDIQMTQTTSSLSASLGDRVTISCRASQDISNYLNWYQQKPDGTVKLLIYYTSRLHSGVPSRFSGSGSGTDYSLTINNLEQEDIATYFCQQGNTRPWTFGGGTKLEIKDKTHTCPPCPAPEFEGGPSVFLFPPKPKDTLMISRTPEVTCVVVAVSHEDPEVKFNWYVDGVEVHNAKTKPREEQYGSTYRVVSVLTVLHQDWLNGKEYKCKVSNKALPAPIEKTISKAKGQPREPQVYTLPPSREEMTKNQVSLWCLVKGFYPSDIAVEWESNGQPENNYKTTPPVLDSDGSFFLYSKLTVDKSRWQQGNVFSCSVMHEALHNHYTQKSLSLSPG

SEQ ID NO: 242 - protein, 724 aa, Artificial Sequence; identical to SEQ ID NO: 238
  artificial antibody construct

SEQ ID NO: 243 - protein, 721 aa, Artificial Sequence
  artificial antibody construct
EVQLQQSGPELVKPGASVKISCKTSGYTFTEYTMHWVKQSHGKSLEWIGGISPNIGGTSYNQKFKGKATLTVDKSSSTAYMELRSLTSEDSAVYYCARRGGSFDYWGQGTTLTVSSGGSGGSGGSDIVMTQSPATLSLSPGERATLSCRSSKSLQNVNGNTYLYWFQQKPGQSPQLLIYRMSNLNSGVPDRFSGSGSGTEFTLTISSLEPEDFAVYYCMQHLEYPITFGAGTKLEIKGGSGGSGGSGGSGGSGGSGGSEVQLVESGGGLVKPGGSLKLSCAASGYTFTSYVMHWVRQAPGKGLEWIGYINPYNDGTKYNEKFQGRVTISSDKSISTAYMELSSLRSEDTAMYYCARGTYYYGTRVFDYWGQGTLVTVSSGGSGGSGGSDIVMTQSPATLSVTPGDRVSLSCRASQSISDYLHWYQQKSHESPRLLIKYASQSISGIPSRFSGSGSGSDFTLSINSVEPEDVGVYYCQNGHSFPLTFGAGTKLELKDKTHTCPPCPAPEFEGGPSVFLFPPKPKDTLMISRTPEVTCVVVAVSHEDPEVKFNWYVDGVEVHNAKTKPREEQYGSTYRVVSVLTVLHQDWLNGKEYKCKVSNKALPAPIEKTISKAKGQPREPQVYTLPPSREEMTKNQVSLWCLVKGFYPSDIAVEWESNGQPENNYKTTPPVLDSDGSFFLYSKLTVDKSRWQQGNVFSCSVMHEALHNHYTQKSLSLSPG

SEQ ID NO: 244 - protein, 724 aa, Artificial Sequence; identical to SEQ ID NO: 238
  artificial antibody construct

SEQ ID NO: 245 - protein, 724 aa, Artificial Sequence
  artificial antibody construct
EVQLVESGGGLVKPGGSLRLSCAASGFTFSSYGMHWVRQAPGKGLEWVAFIRYDGSNKYYADSVKGRFTISRDNSKNTLYLQMNSLRAEDTAVYYCAKDRGLGDGTYFDYWGQGTTVTVSSGGSGGSGGSQPVLTQPPSVSVAPGKTARITCGGNNIGSKSVHWYQQKPGQAPVLVIYYDSDRPSGIPERFSGSNSGNTATLTISRVEAGDEADYYCQVWDTSSDHVLFGGGTKLTVLGGSGGSGGSGGSGGSGGSGGSQVQLQESGPGLVKPSETLSLTCTVSGGSVSSGSYYWSWIRQPPGKGLEWIGYIYYSGSTNYNPSLKSRVTISVDTSKNQFSLKLSSVTAADTAVYYCARNPISIPAFDIWGQGTMVTVSSGGSGGSGGSQSALTQPASVSGSPGQSITISCSGSSSNIGNNAVNWYQQLPGKAPKLLIYYDDLLPSGVSDRFSGSKSGTSAFLAISGLQSEDEADYYCAAWDDSLNGPVFGGGTKLTVLDKTHTCPPCPAPEFEGGPSVFLFPPKPKDTLMISRTPEVTCVVVAVSHEDPEVKFNWYVDGVEVHNAKTKPREEQYGSTYRVVSVLTVLHQDWLNGKEYKCKVSNKALPAPIEKTISKAKGQPREPQVYTLPPSREEMTKNQVSLWCLVKGFYPSDIAVEWESNGQPENNYKTTPPVLDSDGSFFLYSKLTVDKSRWQQGNVFSCSVMHEALHNHYTQKSLSLSPG

SEQ ID NO: 246 - protein, 719 aa, Artificial Sequence
  artificial antibody construct
EVQLVQSGAEVKKPGASVKVSCKASGYTFTNYYMQWVRQAPGQCLEWMGIINPSGGVTSYAQKFQGRVTMTRDTSTSTVYMELSSLRSEDTAVYYCARGSAYYYDFADYWGQGTLVTVSSGGSGGSGGSQPVLTQPPSVSVAPGKTARITCGGNNIGSKSVHWYQQKPGQAPVLVIYYDSDRPSGIPERFSGSNSGNTATLTISRVEAGDEADYYCQVWDTSSDHVLFGGGTKLTVLGGSGGSGGSGGSGGSGGSGGSQVQLQESGPGLVKPSETLSLTCTVSGGSVSSGSYYWSWIRQPPGKGLEWIGYIYYSGSTNYNPSLKSRVTISVDTSKNQFSLKLSSVTAADTAVYYCARNPISIPAFDIWGQGTMVTVSSGGSGGSGGSSYELTQPLSVSVALGQTARITCGGNNIGSKSVHWYQQKPGQAPVLVIYQDKKRPSGIPERFSGSNSGNTATLTISRAQAGDEADYYCQVWDDYIVLFGCGTKLTVLDKTHTCPPCPAPEFEGGPSVFLFPPKPKDTLMISRTPEVTCVVVAVSHEDPEVKFNWYVDGVEVHNAKTKPREEQYGSTYRVVSVLTVLHQDWLNGKEYKCKVSNKALPAPIEKTISKAKGQPREPQVYTLPPSREEMTKNQVSLSCAVKGFYPSDIAVEWESNGQPENNYKTTPPVLDSDGSFFLVSKLTVDKSRWQQGNVFSCSVMHEALHNHYTQKSLSLSPG

SEQ ID NO: 247 - protein, 716 aa, Artificial Sequence
  artificial antibody construct
EVQLQQWGAGLLKPSETLSLTCAVYGGSFSGYYWSWIRQPPGKGLEWIGEIDHSGSTNYNPSLKSRVTISVDTSKNQFSLKLSSVTAADTAVYYCARARGPWSFDPWGQGTLVTVSSGGSGGSGGSQPVLTQPPSVSVAPGKTARITCGGNNIGSKSVHWYQQKPGQAPVLVIYYDSDRPSGIPERFSGSNSGNTATLTISRVEAGDEADYYCQVWDTSSDHVLFGGGTKLTVLGGSGGSGGSGGSGGSGGSGGSQVQLQESGPGLVKPSETLSLTCTVSGGSVSSGSYYWSWIRQPPGKGLEWIGYIYYSGSTNYNPSLKSRVTISVDTSKNQFSLKLSSVTAADTAVYYCARNPISIPAFDIWGQGTMVTVSSGGSGGSGGSDIQMTQSPSTLSASVGDRVTITCRASQSISSWLAWYQQKPGKAPKLLIYKASSLESGVPSRFSGSGSGTEFTLTISSLQPDDFATYYCQQYNSYPTFGGGTKVEIKDKTHTCPPCPAPEFEGGPSVFLFPPKPKDTLMISRTPEVTCVVVAVSHEDPEVKFNWYVDGVEVHNAKTKPREEQYGSTYRVVSVLTVLHQDWLNGKEYKCKVSNKALPAPIEKTISKAKGQPREPQVYTLPPSREEMTKNQVSLWCLVKGFYPSDIAVEWESNGQPENNYKTTPPVLDSDGSFFLYSKLTVDKSRWQQGNVFSCSVMHEALHNHYTQKSLSLSPG

SEQ ID NO: 248 - protein, 719 aa, Artificial Sequence; identical to SEQ ID NO: 246
  artificial antibody construct

SEQ ID NO: 249 - protein, 720 aa, Artificial Sequence
  artificial antibody construct
EVQLQQSGPELVKPGASVKMSCKASGYTFTDYVINWGKQRSGQGLEWIGEIYPGSGTNYYNEKFKAKATLTADKSSNIAYMQLSSLTSEDSAVYFCARRGRYGLYAMDYWGQGTSVTVSSGGSGGSGGSQPVLTQPPSVSVAPGKTARITCGGNNIGSKSVHWYQQKPGQAPVLVIYYDSDRPSGIPERFSGSNSGNTATLTISRVEAGDEADYYCQVWDTSSDHVLFGGGTKLTVLGGSGGSGGSGGSGGSGGSGGSQVQLQESGPGLVKPSETLSLTCTVSGGSVSSGSYYWSWIRQPPGKGLEWIGYIYYSGSTNYNPSLKSRVTISVDTSKNQFSLKLSSVTAADTAVYYCARNPISIPAFDIWGQGTMVTVSSGGSGGSGGSDIQMTQTTSSLSASLGDRVTISCRASQDISNYLNWYQQKPDGTVKLLIYYTSRLHSGVPSRFSGSGSGTDYSLTINNLEQEDIATYFCQQGNTRPWTFGGGTKLEIKDKTHTCPPCPAPEFEGGPSVFLFPPKPKDTLMISRTPEVTCVVVAVSHEDPEVKFNWYVDGVEVHNAKTKPREEQYGSTYRVVSVLTVLHQDWLNGKEYKCKVSNKALPAPIEKTISKAKGQPREPQVYTLPPSREEMTKNQVSLWCLVKGFYPSDIAVEWESNGQPENNYKTTPPVLDSDGSFFLYSKLTVDKSRWQQGNVFSCSVMHEALHNHYTQKSLSLSPG

SEQ ID NO: 250 - protein, 719 aa, Artificial Sequence; identical to SEQ ID NO: 246
  artificial antibody construct

SEQ ID NO: 251 - protein, 716 aa, Artificial Sequence
  artificial antibody construct
EVQLQQSGPELVKPGASVKISCKTSGYTFTEYTMHWVKQSHGKSLEWIGGISPNIGGTSYNQKFKGKATLTVDKSSSTAYMELRSLTSEDSAVYYCARRGGSFDYWGQGTTLTVSSGGSGGSGGSQPVLTQPPSVSVAPGKTARITCGGNNIGSKSVHWYQQKPGQAPVLVIYYDSDRPSGIPERFSGSNSGNTATLTISRVEAGDEADYYCQVWDTSSDHVLFGGGTKLTVLGGSGGSGGSGGSGGSGGSGGSQVQLQESGPGLVKPSETLSLTCTVSGGSVSSGSYYWSWIRQPPGKGLEWIGYIYYSGSTNYNPSLKSRVTISVDTSKNQFSLKLSSVTAADTAVYYCARNPISIPAFDIWGQGTMVTVSSGGSGGSGGSDIVMTQSPATLSVTPGDRVSLSCRASQSISDYLHWYQQKSHESPRLLIKYASQSISGIPSRFSGSGSGSDFTLSINSVEPEDVGVYYCQNGHSFPLTFGAGTKLELKDKTHTCPPCPAPEFEGGPSVFLFPPKPKDTLMISRTPEVTCVVVAVSHEDPEVKFNWYVDGVEVHNAKTKPREEQYGSTYRVVSVLTVLHQDWLNGKEYKCKVSNKALPAPIEKTISKAKGQPREPQVYTLPPSREEMTKNQVSLWCLVKGFYPSDIAVEWESNGQPENNYKTTPPVLDSDGSFFLYSKLTVDKSRWQQGNVFSCSVMHEALHNHYTQKSLSLSPG

SEQ ID NO: 252 - protein, 719 aa, Artificial Sequence; identical to SEQ ID NO: 246
  artificial antibody construct

SEQ ID NO: 253 - protein, 729 aa, Artificial Sequence
  artificial antibody construct
EVQLVESGGGLVKPGGSLRLSCAASGFTFSSYGMHWVRQAPGKGLEWVAFIRYDGSNKYYADSVKGRFTISRDNSKNTLYLQMNSLRAEDTAVYYCAKDRGLGDGTYFDYWGQGTTVTVSSGGSGGSGGSDIVMTQSPATLSLSPGERATLSCRSSKSLQNVNGNTYLYWFQQKPGQSPQLLIYRMSNLNSGVPDRFSGSGSGTEFTLTISSLEPEDFAVYYCMQHLEYPITFGAGTKLEIKGGSGGSGGSGGSGGSGGSGGSEVQLVESGGGLVKPGGSLKLSCAASGYTFTSYVMHWVRQAPGKGLEWIGYINPYNDGTKYNEKFQGRVTISSDKSISTAYMELSSLRSEDTAMYYCARGTYYYGTRVFDYWGQGTLVTVSSGGSGGSGGSQSALTQPASVSGSPGQSITISCSGSSSNIGNNAVNWYQQLPGKAPKLLIYYDDLLPSGVSDRFSGSKSGTSAFLAISGLQSEDEADYYCAAWDDSLNGPVFGGGTKLTVLDKTHTCPPCPAPELLGGPSVFLFPPKPKDTLMISRTPEVTCVVVDVSHEDPEVKFNWYVDGVEVHNAKTKPREEQYNSTYRVVSVLTVLHQDWLNGKEYKCKVSNKALPAPIEKTISKAKGQPREPQVYTLPPSREEMTKNQVSLWCLVKGFYPSDIAVEWESNGQPENNYKTTPPVLDSDGSFFLYSKLTVDKSRWQQGNVFSCSVMHEALHNHYTQKSLSLSPG

SEQ ID NO: 254 - protein, 480 aa, Artificial Sequence
  artificial antibody construct
DIVMTQSPATLSLSPGERATLSCRSSKSLQNVNGNTYLYWFQQKPGQSPQLLIYRMSNLNSGVPDRFSGSGSGTEFTLTISSLEPEDFAVYYCMQHLEYPITFGAGTKLEIKGGSGGSGGSGGSGGSGGSGGSEVQLVESGGGLVKPGGSLKLSCAASGYTFTSYVMHWVRQAPGKGLEWIGYINPYNDGTKYNEKFQGRVTISSDKSISTAYMELSSLRSEDTAMYYCARGTYYYGTRVFDYWGQGTLVTVSSDKTHTCPPCPAPELLGGPSVFLFPPKPKDTLMISRTPEVTCVVVDVSHEDPEVKFNWYVDGVEVHNAKTKPREEQYNSTYRVVSVLTVLHQDWLNGKEYKCKVSNKALPAPIEKTISKAKGQPREPQVYTLPPSREEMTKNQVSLSCAVKGFYPSDIAVEWESNGQPENNYKTTPPVLDSDGSFFLVSKLTVDKSRWQQGNVFSCSVMHEALHNHYTQKSLSLSPG

SEQ ID NO: 255 - protein, 721 aa, Artificial Sequence
  artificial antibody construct
EVQLQQWGAGLLKPSETLSLTCAVYGGSFSGYYWSWIRQPPGKGLEWIGEIDHSGSTNYNPSLKSRVTISVDTSKNQFSLKLSSVTAADTAVYYCARARGPWSFDPWGQGTLVTVSSGGSGGSGGSDIVMTQSPATLSLSPGERATLSCRSSKSLQNVNGNTYLYWFQQKPGQSPQLLIYRMSNLNSGVPDRFSGSGSGTEFTLTISSLEPEDFAVYYCMQHLEYPITFGAGTKLEIKGGSGGSGGSGGSGGSGGSGGSEVQLVESGGGLVKPGGSLKLSCAASGYTFTSYVMHWVRQAPGKGLEWIGYINPYNDGTKYNEKFQGRVTISSDKSISTAYMELSSLRSEDTAMYYCARGTYYYGTRVFDYWGQGTLVTVSSGGSGGSGGSDIQMTQSPSTLSASVGDRVTITCRASQSISSWLAWYQQKPGKAPKLLIYKASSLESGVPSRFSGSGSGTEFTLTISSLQPDDFATYYCQQYNSYPTFGGGTKVEIKDKTHTCPPCPAPELLGGPSVFLFPPKPKDTLMISRTPEVTCVVVDVSHEDPEVKFNWYVDGVEVHNAKTKPREEQYNSTYRVVSVLTVLHQDWLNGKEYKCKVSNKALPAPIEKTISKAKGQPREPQVYTLPPSREEMTKNQVSLWCLVKGFYPSDIAVEWESNGQPENNYKTTPPVLDSDGSFFLYSKLTVDKSRWQQGNVFSCSVMHEALHNHYTQKSLSLSPG

SEQ ID NO: 256 - protein, 480 aa, Artificial Sequence; identical to SEQ ID NO: 254
  artificial antibody construct

SEQ ID NO: 257 - protein, 725 aa, Artificial Sequence
  artificial antibody construct
EVQLQQSGPELVKPGASVKMSCKASGYTFTDYVINWGKQRSGQGLEWIGEIYPGSGTNYYNEKFKAKATLTADKSSNIAYMQLSSLTSEDSAVYFCARRGRYGLYAMDYWGQGTSVTVSSGGSGGSGGSDIVMTQSPATLSLSPGERATLSCRSSKSLQNVNGNTYLYWFQQKPGQSPQLLIYRMSNLNSGVPDRFSGSGSGTEFTLTISSLEPEDFAVYYCMQHLEYPITFGAGTKLEIKGGSGGSGGSGGSGGSGGSGGSEVQLVESGGGLVKPGGSLKLSCAASGYTFTSYVMHWVRQAPGKGLEWIGYINPYNDGTKYNEKFQGRVTISSDKSISTAYMELSSLRSEDTAMYYCARGTYYYGTRVFDYWGQGTLVTVSSGGSGGSGGSDIQMTQTTSSLSASLGDRVTISCRASQDISNYLNWYQQKPDGTVKLLIYYTSRLHSGVPSRFSGSGSGTDYSLTINNLEQEDIATYFCQQGNTRPWTFGGGTKLEIKDKTHTCPPCPAPELLGGPSVFLFPPKPKDTLMISRTPEVTCVVVDVSHEDPEVKFNWYVDGVEVHNAKTKPREEQYNSTYRVVSVLTVLHQDWLNGKEYKCKVSNKALPAPIEKTISKAKGQPREPQVYTLPPSREEMTKNQVSLWCLVKGFYPSDIAVEWESNGQPENNYKTTPPVLDSDGSFFLYSKLTVDKSRWQQGNVFSCSVMHEALHNHYTQKSLSLSPG

SEQ ID NO: 258 - protein, 480 aa, Artificial Sequence; identical to SEQ ID NO: 254
  artificial antibody construct

SEQ ID NO: 259 - protein, 721 aa, Artificial Sequence
  artificial antibody construct
EVQLQQSGPELVKPGASVKISCKTSGYTFTEYTMHWVKQSHGKSLEWIGGISPNIGGTSYNQKFKGKATLTVDKSSSTAYMELRSLTSEDSAVYYCARRGGSFDYWGQGTTLTVSSGGSGGSGGSDIVMTQSPATLSLSPGERATLSCRSSKSLQNVNGNTYLYWFQQKPGQSPQLLIYRMSNLNSGVPDRFSGSGSGTEFTLTISSLEPEDFAVYYCMQHLEYPITFGAGTKLEIKGGSGGSGGSGGSGGSGGSGGSEVQLVESGGGLVKPGGSLKLSCAASGYTFTSYVMHWVRQAPGKGLEWIGYINPYNDGTKYNEKFQGRVTISSDKSISTAYMELSSLRSEDTAMYYCARGTYYYGTRVFDYWGQGTLVTVSSGGSGGSGGSDIVMTQSPATLSVTPGDRVSLSCRASQSISDYLHWYQQKSHESPRLLIKYASQSISGIPSRFSGSGSGSDFTLSINSVEPEDVGVYYCQNGHSFPLTFGAGTKLELKDKTHTCPPCPAPELLGGPSVFLFPPKPKDTLMISRTPEVTCVVVDVSHEDPEVKFNWYVDGVEVHNAKTKPREEQYNSTYRVVSVLTVLHQDWLNGKEYKCKVSNKALPAPIEKTISKAKGQPREPQVYTLPPSREEMTKNQVSLWCLVKGFYPSDIAVEWESNGQPENNYKTTPPVLDSDGSFFLYSKLTVDKSRWQQGNVFSCSVMHEALHNHYTQKSLSLSPG

SEQ ID NO: 260 - protein, 480 aa, Artificial Sequence; identical to SEQ ID NO: 254
  artificial antibody construct

SEQ ID NO: 261 - protein, 729 aa, Artificial Sequence; identical to SEQ ID NO: 237
  artificial antibody construct

SEQ ID NO: 262 - protein, 727 aa, Artificial Sequence
  artificial antibody construct
QVTLKESGPGILQPSQTLSLTCSFSGFSLRTSGMGVGWIRQPSGKGLEWLAHIWWDDDKRYNPALKSRLTISKDTSSNQVFLKIASVDTADTATYYCAQINPAWFAYWGQGTLVTVSAGGSGGSGGSDIVMTQSPATLSLSPGERATLSCRSSKSLQNVNGNTYLYWFQQKPGQSPQLLIYRMSNLNSGVPDRFSGSGSGTEFTLTISSLEPEDFAVYYCMQHLEYPITFGAGTKLEIKGGSGGSGGSGGSGGSGGSGGSEVQLVESGGGLVKPGGSLKLSCAASGYTFTSYVMHWVRQAPGKGLEWIGYINPYNDGTKYNEKFQGRVTISSDKSISTAYMELSSLRSEDTAMYYCARGTYYYGTRVFDYWGQGTLVTVSSGGSGGSGGSDIVLTQSPASLAVSLGQRATISCKASQSVDFDGDSFMNWYQQKPGQPPKLLIYTTSNLESGIPARFSASGSGTDFTLNIHPVEEEDTATYYCQQSNEDPYTFGGGTKLELKDKTHTCPPCPAPEFEGGPSVFLFPPKPKDTLMISRTPEVTCVVVAVSHEDPEVKFNWYVDGVEVHNAKTKPREEQYGSTYRVVSVLTVLHQDWLNGKEYKCKVSNKALPAPIEKTISKAKGQPREPQVYTLPPSREEMTKNQVSLSCAVKGFYPSDIAVEWESNGQPENNYKTTPPVLDSDGSFFLVSKLTVDKSRWQQGNVFSCSVMHEALHNHYTQKSLSLSPG

SEQ ID NO: 263 - protein, 721 aa, Artificial Sequence; identical to SEQ ID NO: 239
  artificial antibody construct

SEQ ID NO: 264 - protein, 727 aa, Artificial Sequence; identical to SEQ ID NO: 262
  artificial antibody construct

SEQ ID NO: 265 - protein, 725 aa, Artificial Sequence; identical to SEQ ID NO: 241
  artificial antibody construct

SEQ ID NO: 266 - protein, 727 aa, Artificial Sequence; identical to SEQ ID NO: 262
  artificial antibody construct

SEQ ID NO: 267 - protein, 721 aa, Artificial Sequence; identical to SEQ ID NO: 243
  artificial antibody construct

SEQ ID NO: 268 - protein, 727 aa, Artificial Sequence; identical to SEQ ID NO: 262
  artificial antibody construct

SEQ ID NO: 269 - protein, 734 aa, Artificial Sequence
  artificial antibody construct
EVQLVESGGGLVKPGGSLKLSCAASGYTFTSYVMHWVRQAPGKGLEWIGYINPYNDGTKYNEKFQGRVTISSDKSISTAYMELSSLRSEDTAMYYCARGTYYYGTRVFDYWGQGTLVTVSSGGSGGSGGSGGSGGSGGSDIVMTQSPATLSLSPGERATLSCRSSKSLQNVNGNTYLYWFQQKPGQSPQLLIYRMSNLNSGVPDRFSGSGSGTEFTLTISSLEPEDFAVYYCMQHLEYPITFGAGTKLEIKGGGGSQSALTQPASVSGSPGQSITISCSGSSSNIGNNAVNWYQQLPGKAPKLLIYYDDLLPSGVSDRFSGSKSGTSAFLAISGLQSEDEADYYCAAWDDSLNGPVFGGGTKLTVLGGSGGSGGSGGSGGSGGSGGSQVQLVESGGGLVKPGGSLRLSCAASGFTFSSYGMHWVRQAPGKGLEWVAFIRYDGSNKYYADSVKGRFTISRDNSKNTLYLQMNSLRAEDTAVYYCAKDRGLGDGTYFDYWGQGTTVTVSSDKTHTCPPCPAPEFEGGPSVFLFPPKPKDTLMISRTPEVTCVVVAVSHEDPEVKFNWYVDGVEVHNAKTKPREEQYGSTYRVVSVLTVLHQDWLNGKEYKCKVSNKALPAPIEKTISKAKGQPREPQVYTLPPSREEMTKNQVSLWCLVKGFYPSDIAVEWESNGQPENNYKTTPPVLDSDGSFFLYSKLTVDKSRWQQGNVFSCSVMHEALHNHYTQKSLSLSPG

SEQ ID NO: 270 - protein, 729 aa, Artificial Sequence
  artificial antibody construct
EVQLVESGGGLVKPGGSLKLSCAASGYTFTSYVMHWVRQAPGKGLEWIGYINPYNDGTKYNEKFQGRVTISSDKSISTAYMELSSLRSEDTAMYYCARGTYYYGTRVFDYWGQGTLVTVSSGGSGGSGGSGGSGGSGGSDIVMTQSPATLSLSPGERATLSCRSSKSLQNVNGNTYLYWFQQKPGQSPQLLIYRMSNLNSGVPDRFSGSGSGTEFTLTISSLEPEDFAVYYCMQHLEYPITFGAGTKLEIKGGGGSSYELTQPLSVSVALGQTARITCGGNNIGSKSVHWYQQKPGQAPVLVIYQDKKRPSGIPERFSGSNSGNTATLTISRAQAGDEADYYCQVWDDYIVLFGCGTKLTVLGGSGGSGGSGGSGGSGGSGGSQVQLVQSGAEVKKPGASVKVSCKASGYTFTNYYMQWVRQAPGQCLEWMGIINPSGGVTSYAQKFQGRVTMTRDTSTSTVYMELSSLRSEDTAVYYCARGSAYYYDFADYWGQGTLVTVSSDKTHTCPPCPAPEFEGGPSVFLFPPKPKDTLMISRTPEVTCVVVAVSHEDPEVKFNWYVDGVEVHNAKTKPREEQYGSTYRVVSVLTVLHQDWLNGKEYKCKVSNKALPAPIEKTISKAKGQPREPQVYTLPPSREEMTKNQVSLSCAVKGFYPSDIAVEWESNGQPENNYKTTPPVLDSDGSFFLVSKLTVDKSRWQQGNVFSCSVMHEALHNHYTQKSLSLSPG

SEQ ID NO: 271 - protein, 726 aa, Artificial Sequence
  artificial antibody construct
EVQLVESGGGLVKPGGSLKLSCAASGYTFTSYVMHWVRQAPGKGLEWIGYINPYNDGTKYNEKFQGRVTISSDKSISTAYMELSSLRSEDTAMYYCARGTYYYGTRVFDYWGQGTLVTVSSGGSGGSGGSGGSGGSGGSDIVMTQSPATLSLSPGERATLSCRSSKSLQNVNGNTYLYWFQQKPGQSPQLLIYRMSNLNSGVPDRFSGSGSGTEFTLTISSLEPEDFAVYYCMQHLEYPITFGAGTKLEIKGGGGSDIQMTQSPSTLSASVGDRVTITCRASQSISSWLAWYQQKPGKAPKLLIYKASSLESGVPSRFSGSGSGTEFTLTISSLQPDDFATYYCQQYNSYPTFGGGTKVEIKGGSGGSGGSGGSGGSGGSGGSQVQLQQWGAGLLKPSETLSLTCAVYGGSFSGYYWSWIRQPPGKGLEWIGEIDHSGSTNYNPSLKSRVTISVDTSKNQFSLKLSSVTAADTAVYYCARARGPWSFDPWGQGTLVTVSSDKTHTCPPCPAPEFEGGPSVFLFPPKPKDTLMISRTPEVTCVVVAVSHEDPEVKFNWYVDGVEVHNAKTKPREEQYGSTYRVVSVLTVLHQDWLNGKEYKCKVSNKALPAPIEKTISKAKGQPREPQVYTLPPSREEMTKNQVSLWCLVKGFYPSDIAVEWESNGQPENNYKTTPPVLDSDGSFFLYSKLTVDKSRWQQGNVFSCSVMHEALHNHYTQKSLSLSPG

SEQ ID NO: 272 - protein, 729 aa, Artificial Sequence; identical to SEQ ID NO: 270
  artificial antibody construct

SEQ ID NO: 273 - protein, 730 aa, Artificial Sequence
  artificial antibody construct
EVQLVESGGGLVKPGGSLKLSCAASGYTFTSYVMHWVRQAPGKGLEWIGYINPYNDGTKYNEKFQGRVTISSDKSISTAYMELSSLRSEDTAMYYCARGTYYYGTRVFDYWGQGTLVTVSSGGSGGSGGSGGSGGSGGSDIVMTQSPATLSLSPGERATLSCRSSKSLQNVNGNTYLYWFQQKPGQSPQLLIYRMSNLNSGVPDRFSGSGSGTEFTLTISSLEPEDFAVYYCMQHLEYPITFGAGTKLEIKGGGGSDIQMTQTTSSLSASLGDRVTISCRASQDISNYLNWYQQKPDGTVKLLIYYTSRLHSGVPSRFSGSGSGTDYSLTINNLEQEDIATYFCQQGNTRPWTFGGGTKLEIKGGSGGSGGSGGSGGSGGSGGSQVQLQQSGPELVKPGASVKMSCKASGYTFTDYVINWGKQRSGQGLEWIGEIYPGSGTNYYNEKFKAKATLTADKSSNIAYMQLSSLTSEDSAVYFCARRGRYGLYAMDYWGQGTSVTVSSDKTHTCPPCPAPEFEGGPSVFLFPPKPKDTLMISRTPEVTCVVVAVSHEDPEVKFNWYVDGVEVHNAKTKPREEQYGSTYRVVSVLTVLHQDWLNGKEYKCKVSNKALPAPIEKTISKAKGQPREPQVYTLPPSREEMTKNQVSLWCLVKGFYPSDIAVEWESNGQPENNYKTTPPVLDSDGSFFLYSKLTVDKSRWQQGNVFSCSVMHEALHNHYTQKSLSLSPG

SEQ ID NO: 274 - protein, 729 aa, Artificial Sequence; identical to SEQ ID NO: 270
  artificial antibody construct

SEQ ID NO: 275 - protein, 726 aa, Artificial Sequence
  artificial antibody construct
EVQLVESGGGLVKPGGSLKLSCAASGYTFTSYVMHWVRQAPGKGLEWIGYINPYNDGTKYNEKFQGRVTISSDKSISTAYMELSSLRSEDTAMYYCARGTYYYGTRVFDYWGQGTLVTVSSGGSGGSGGSGGSGGSGGSDIVMTQSPATLSLSPGERATLSCRSSKSLQNVNGNTYLYWFQQKPGQSPQLLIYRMSNLNSGVPDRFSGSGSGTEFTLTISSLEPEDFAVYYCMQHLEYPITFGAGTKLEIKGGGGSDIVMTQSPATLSVTPGDRVSLSCRASQSISDYLHWYQQKSHESPRLLIKYASQSISGIPSRFSGSGSGSDFTLSINSVEPEDVGVYYCQNGHSFPLTFGAGTKLELKGGSGGSGGSGGSGGSGGSGGSEVQLQQSGPELVKPGASVKISCKTSGYTFTEYTMHWVKQSHGKSLEWIGGISPNIGGTSYNQKFKGKATLTVDKSSSTAYMELRSLTSEDSAVYYCARRGGSFDYWGQGTTLTVSSDKTHTCPPCPAPEFEGGPSVFLFPPKPKDTLMISRTPEVTCVVVAVSHEDPEVKFNWYVDGVEVHNAKTKPREEQYGSTYRVVSVLTVLHQDWLNGKEYKCKVSNKALPAPIEKTISKAKGQPREPQVYTLPPSREEMTKNQVSLWCLVKGFYPSDIAVEWESNGQPENNYKTTPPVLDSDGSFFLYSKLTVDKSRWQQGNVFSCSVMHEALHNHYTQKSLSLSPG

SEQ ID NO: 276 - protein, 729 aa, Artificial Sequence; identical to SEQ ID NO: 270
  artificial antibody construct

SEQ ID NO: 277 - protein, 729 aa, Artificial Sequence
  artificial antibody construct
EVQLQESGPGLVKPSETLSLTCTVSGGSVSSGSYYWSWIRQPPGKGLEWIGYIYYSGSTNYNPSLKSRVTISVDTSKNQFSLKLSSVTAADTAVYYCARNPISIPAFDIWGQGTMVTVSSGGSGGSGGSGGSGGSGGSQPVLTQPPSVSVAPGKTARITCGGNNIGSKSVHWYQQKPGQAPVLVIYYDSDRPSGIPERFSGSNSGNTATLTISRVEAGDEADYYCQVWDTSSDHVLFGGGTKLTVLGGGGSQSALTQPASVSGSPGQSITISCSGSSSNIGNNAVNWYQQLPGKAPKLLIYYDDLLPSGVSDRFSGSKSGTSAFLAISGLQSEDEADYYCAAWDDSLNGPVFGGGTKLTVLGGSGGSGGSGGSGGSGGSGGSQVQLVESGGGLVKPGGSLRLSCAASGFTFSSYGMHWVRQAPGKGLEWVAFIRYDGSNKYYADSVKGRFTISRDNSKNTLYLQMNSLRAEDTAVYYCAKDRGLGDGTYFDYWGQGTTVTVSSDKTHTCPPCPAPEFEGGPSVFLFPPKPKDTLMISRTPEVTCVVVAVSHEDPEVKFNWYVDGVEVHNAKTKPREEQYGSTYRVVSVLTVLHQDWLNGKEYKCKVSNKALPAPIEKTISKAKGQPREPQVYTLPPSREEMTKNQVSLWCLVKGFYPSDIAVEWESNGQPENNYKTTPPVLDSDGSFFLYSKLTVDKSRWQQGNVFSCSVMHEALHNHYTQKSLSLSPG

SEQ ID NO: 278 - protein, 724 aa, Artificial Sequence
  artificial antibody construct
EVQLQESGPGLVKPSETLSLTCTVSGGSVSSGSYYWSWIRQPPGKGLEWIGYIYYSGSTNYNPSLKSRVTISVDTSKNQFSLKLSSVTAADTAVYYCARNPISIPAFDIWGQGTMVTVSSGGSGGSGGSGGSGGSGGSQPVLTQPPSVSVAPGKTARITCGGNNIGSKSVHWYQQKPGQAPVLVIYYDSDRPSGIPERFSGSNSGNTATLTISRVEAGDEADYYCQVWDTSSDHVLFGGGTKLTVLGGGGSSYELTQPLSVSVALGQTARITCGGNNIGSKSVHWYQQKPGQAPVLVIYQDKKRPSGIPERFSGSNSGNTATLTISRAQAGDEADYYCQVWDDYIVLFGCGTKLTVLGGSGGSGGSGGSGGSGGSGGSQVQLVQSGAEVKKPGASVKVSCKASGYTFTNYYMQWVRQAPGQCLEWMGIINPSGGVTSYAQKFQGRVTMTRDTSTSTVYMELSSLRSEDTAVYYCARGSAYYYDFADYWGQGTLVTVSSDKTHTCPPCPAPEFEGGPSVFLFPPKPKDTLMISRTPEVTCVVVAVSHEDPEVKFNWYVDGVEVHNAKTKPREEQYGSTYRVVSVLTVLHQDWLNGKEYKCKVSNKALPAPIEKTISKAKGQPREPQVYTLPPSREEMTKNQVSLSCAVKGFYPSDIAVEWESNGQPENNYKTTPPVLDSDGSFFLVSKLTVDKSRWQQGNVFSCSVMHEALHNHYTQKSLSLSPG

SEQ ID NO: 279 - protein, 721 aa, Artificial Sequence
  artificial antibody construct
EVQLQESGPGLVKPSETLSLTCTVSGGSVSSGSYYWSWIRQPPGKGLEWIGYIYYSGSTNYNPSLKSRVTISVDTSKNQFSLKLSSVTAADTAVYYCARNPISIPAFDIWGQGTMVTVSSGGSGGSGGSGGSGGSGGSQPVLTQPPSVSVAPGKTARITCGGNNIGSKSVHWYQQKPGQAPVLVIYYDSDRPSGIPERFSGSNSGNTATLTISRVEAGDEADYYCQVWDTSSDHVLFGGGTKLTVLGGGGSDIQMTQSPSTLSASVGDRVTITCRASQSISSWLAWYQQKPGKAPKLLIYKASSLESGVPSRFSGSGSGTEFTLTISSLQPDDFATYYCQQYNSYPTFGGGTKVEIKGGSGGSGGSGGSGGSGGSGGSQVQLQQWGAGLLKPSETLSLTCAVYGGSFSGYYWSWIRQPPGKGLEWIGEIDHSGSTNYNPSLKSRVTISVDTSKNQFSLKLSSVTAADTAVYYCARARGPWSFDPWGQGTLVTVSSDKTHTCPPCPAPEFEGGPSVFLFPPKPKDTLMISRTPEVTCVVVAVSHEDPEVKFNWYVDGVEVHNAKTKPREEQYGSTYRVVSVLTVLHQDWLNGKEYKCKVSNKALPAPIEKTISKAKGQPREPQVYTLPPSREEMTKNQVSLWCLVKGFYPSDIAVEWESNGQPENNYKTTPPVLDSDGSFFLYSKLTVDKSRWQQGNVFSCSVMHEALHNHYTQKSLSLSPG

SEQ ID NO: 280 - protein, 724 aa, Artificial Sequence; identical to SEQ ID NO: 278
  artificial antibody construct

SEQ ID NO: 281 - protein, 725 aa, Artificial Sequence
  artificial antibody construct
EVQLQESGPGLVKPSETLSLTCTVSGGSVSSGSYYWSWIRQPPGKGLEWIGYIYYSGSTNYNPSLKSRVTISVDTSKNQFSLKLSSVTAADTAVYYCARNPISIPAFDIWGQGTMVTVSSGGSGGSGGSGGSGGSGGSQPVLTQPPSVSVAPGKTARITCGGNNIGSKSVHWYQQKPGQAPVLVIYYDSDRPSGIPERFSGSNSGNTATLTISRVEAGDEADYYCQVWDTSSDHVLFGGGTKLTVLGGGGSDIQMTQTTSSLSASLGDRVTISCRASQDISNYLNWYQQKPDGTVKLLIYYTSRLHSGVPSRFSGSGSGTDYSLTINNLEQEDIATYFCQQGNTRPWTFGGGTKLEIKGGSGGSGGSGGSGGSGGSGGSQVQLQQSGPELVKPGASVKMSCKASGYTFTDYVINWGKQRSGQGLEWIGEIYPGSGTNYYNEKFKAKATLTADKSSNIAYMQLSSLTSEDSAVYFCARRGRYGLYAMDYWGQGTSVTVSSDKTHTCPPCPAPEFEGGPSVFLFPPKPKDTLMISRTPEVTCVVVAVSHEDPEVKFNWYVDGVEVHNAKTKPREEQYGSTYRVVSVLTVLHQDWLNGKEYKCKVSNKALPAPIEKTISKAKGQPREPQVYTLPPSREEMTKNQVSLWCLVKGFYPSDIAVEWESNGQPENNYKTTPPVLDSDGSFFLYSKLTVDKSRWQQGNVFSCSVMHEALHNHYTQKSLSLSPG

SEQ ID NO: 282 - protein, 724 aa, Artificial Sequence; identical to SEQ ID NO: 278
  artificial antibody construct

SEQ ID NO: 283 - protein, 721 aa, Artificial Sequence
  artificial antibody construct
EVQLQESGPGLVKPSETLSLTCTVSGGSVSSGSYYWSWIRQPPGKGLEWIGYIYYSGSTNYNPSLKSRVTISVDTSKNQFSLKLSSVTAADTAVYYCARNPISIPAFDIWGQGTMVTVSSGGSGGSGGSGGSGGSGGSQPVLTQPPSVSVAPGKTARITCGGNNIGSKSVHWYQQKPGQAPVLVIYYDSDRPSGIPERFSGSNSGNTATLTISRVEAGDEADYYCQVWDTSSDHVLFGGGTKLTVLGGGGSDIVMTQSPATLSVTPGDRVSLSCRASQSISDYLHWYQQKSHESPRLLIKYASQSISGIPSRFSGSGSGSDFTLSINSVEPEDVGVYYCQNGHSFPLTFGAGTKLELKGGSGGSGGSGGSGGSGGSGGSEVQLQQSGPELVKPGASVKISCKTSGYTFTEYTMHWVKQSHGKSLEWIGGISPNIGGTSYNQKFKGKATLTVDKSSSTAYMELRSLTSEDSAVYYCARRGGSFDYWGQGTTLTVSSDKTHTCPPCPAPEFEGGPSVFLFPPKPKDTLMISRTPEVTCVVVAVSHEDPEVKFNWYVDGVEVHNAKTKPREEQYGSTYRVVSVLTVLHQDWLNGKEYKCKVSNKALPAPIEKTISKAKGQPREPQVYTLPPSREEMTKNQVSLWCLVKGFYPSDIAVEWESNGQPENNYKTTPPVLDSDGSFFLYSKLTVDKSRWQQGNVFSCSVMHEALHNHYTQKSLSLSPG

SEQ ID NO: 284 - protein, 724 aa, Artificial Sequence; identical to SEQ ID NO: 278
  artificial antibody construct

SEQ ID NO: 285 - protein, 734 aa, Artificial Sequence
  artificial antibody construct
EVQLVESGGGLVKPGGSLKLSCAASGYTFTSYVMHWVRQAPGKGLEWIGYINPYNDGTKYNEKFQGRVTISSDKSISTAYMELSSLRSEDTAMYYCARGTYYYGTRVFDYWGQGTLVTVSSGGSGGSGGSGGSGGSGGSDIVMTQSPATLSLSPGERATLSCRSSKSLQNVNGNTYLYWFQQKPGQSPQLLIYRMSNLNSGVPDRFSGSGSGTEFTLTISSLEPEDFAVYYCMQHLEYPITFGAGTKLEIKGGGGSQSALTQPASVSGSPGQSITISCSGSSSNIGNNAVNWYQQLPGKAPKLLIYYDDLLPSGVSDRFSGSKSGTSAFLAISGLQSEDEADYYCAAWDDSLNGPVFGGGTKLTVLGGSGGSGGSGGSGGSGGSGGSQVQLVESGGGLVKPGGSLRLSCAASGFTFSSYGMHWVRQAPGKGLEWVAFIRYDGSNKYYADSVKGRFTISRDNSKNTLYLQMNSLRAEDTAVYYCAKDRGLGDGTYFDYWGQGTTVTVSSDKTHTCPPCPAPELLGGPSVFLFPPKPKDTLMISRTPEVTCVVVDVSHEDPEVKFNWYVDGVEVHNAKTKPREEQYNSTYRVVSVLTVLHQDWLNGKEYKCKVSNKALPAPIEKTISKAKGQPREPQVYTLPPSREEMTKNQVSLWCLVKGFYPSDIAVEWESNGQPENNYKTTPPVLDSDGSFFLYSKLTVDKSRWQQGNVFSCSVMHEALHNHYTQKSLSLSPG

SEQ ID NO: 286 - protein, 477 aa, Artificial Sequence
  artificial antibody construct
EVQLVESGGGLVKPGGSLKLSCAASGYTFTSYVMHWVRQAPGKGLEWIGYINPYNDGTKYNEKFQGRVTISSDKSISTAYMELSSLRSEDTAMYYCARGTYYYGTRVFDYWGQGTLVTVSSGGSGGSGGSGGSGGSGGSDIVMTQSPATLSLSPGERATLSCRSSKSLQNVNGNTYLYWFQQKPGQSPQLLIYRMSNLNSGVPDRFSGSGSGTEFTLTISSLEPEDFAVYYCMQHLEYPITFGAGTKLEIKDKTHTCPPCPAPELLGGPSVFLFPPKPKDTLMISRTPEVTCVVVDVSHEDPEVKFNWYVDGVEVHNAKTKPREEQYNSTYRVVSVLTVLHQDWLNGKEYKCKVSNKALPAPIEKTISKAKGQPREPQVYTLPPSREEMTKNQVSLSCAVKGFYPSDIAVEWESNGQPENNYKTTPPVLDSDGSFFLVSKLTVDKSRWQQGNVFSCSVMHEALHNHYTQKSLSLSPG

SEQ ID NO: 287 - protein, 726 aa, Artificial Sequence
  artificial antibody construct
EVQLVESGGGLVKPGGSLKLSCAASGYTFTSYVMHWVRQAPGKGLEWIGYINPYNDGTKYNEKFQGRVTISSDKSISTAYMELSSLRSEDTAMYYCARGTYYYGTRVFDYWGQGTLVTVSSGGSGGSGGSGGSGGSGGSDIVMTQSPATLSLSPGERATLSCRSSKSLQNVNGNTYLYWFQQKPGQSPQLLIYRMSNLNSGVPDRFSGSGSGTEFTLTISSLEPEDFAVYYCMQHLEYPITFGAGTKLEIKGGGGSDIQMTQSPSTLSASVGDRVTITCRASQSISSWLAWYQQKPGKAPKLLIYKASSLESGVPSRFSGSGSGTEFTLTISSLQPDDFATYYCQQYNSYPTFGGGTKVEIKGGSGGSGGSGGSGGSGGSGGSQVQLQQWGAGLLKPSETLSLTCAVYGGSFSGYYWSWIRQPPGKGLEWIGEIDHSGSTNYNPSLKSRVTISVDTSKNQFSLKLSSVTAADTAVYYCARARGPWSFDPWGQGTLVTVSSDKTHTCPPCPAPELLGGPSVFLFPPKPKDTLMISRTPEVTCVVVDVSHEDPEVKFNWYVDGVEVHNAKTKPREEQYNSTYRVVSVLTVLHQDWLNGKEYKCKVSNKALPAPIEKTISKAKGQPREPQVYTLPPSREEMTKNQVSLWCLVKGFYPSDIAVEWESNGQPENNYKTTPPVLDSDGSFFLYSKLTVDKSRWQQGNVFSCSVMHEALHNHYTQKSLSLSPG

SEQ ID NO: 288 - protein, 477 aa, Artificial Sequence; identical to SEQ ID NO: 286
  artificial antibody construct

SEQ ID NO: 289 - protein, 730 aa, Artificial Sequence
  artificial antibody construct
EVQLVESGGGLVKPGGSLKLSCAASGYTFTSYVMHWVRQAPGKGLEWIGYINPYNDGTKYNEKFQGRVTISSDKSISTAYMELSSLRSEDTAMYYCARGTYYYGTRVFDYWGQGTLVTVSSGGSGGSGGSGGSGGSGGSDIVMTQSPATLSLSPGERATLSCRSSKSLQNVNGNTYLYWFQQKPGQSPQLLIYRMSNLNSGVPDRFSGSGSGTEFTLTISSLEPEDFAVYYCMQHLEYPITFGAGTKLEIKGGGGSDIQMTQTTSSLSASLGDRVTISCRASQDISNYLNWYQQKPDGTVKLLIYYTSRLHSGVPSRFSGSGSGTDYSLTINNLEQEDIATYFCQQGNTRPWTFGGGTKLEIKGGSGGSGGSGGSGGSGGSGGSQVQLQQSGPELVKPGASVKMSCKASGYTFTDYVINWGKQRSGQGLEWIGEIYPGSGTNYYNEKFKAKATLTADKSSNIAYMQLSSLTSEDSAVYFCARRGRYGLYAMDYWGQGTSVTVSSDKTHTCPPCPAPELLGGPSVFLFPPKPKDTLMISRTPEVTCVVVDVSHEDPEVKFNWYVDGVEVHNAKTKPREEQYNSTYRVVSVLTVLHQDWLNGKEYKCKVSNKALPAPIEKTISKAKGQPREPQVYTLPPSREEMTKNQVSLWCLVKGFYPSDIAVEWESNGQPENNYKTTPPVLDSDGSFFLYSKLTVDKSRWQQGNVFSCSVMHEALHNHYTQKSLSLSPG

SEQ ID NO: 290 - protein, 477 aa, Artificial Sequence; identical to SEQ ID NO: 286
  artificial antibody construct

SEQ ID NO: 291 - protein, 726 aa, Artificial Sequence
  artificial antibody construct
EVQLVESGGGLVKPGGSLKLSCAASGYTFTSYVMHWVRQAPGKGLEWIGYINPYNDGTKYNEKFQGRVTISSDKSISTAYMELSSLRSEDTAMYYCARGTYYYGTRVFDYWGQGTLVTVSSGGSGGSGGSGGSGGSGGSDIVMTQSPATLSLSPGERATLSCRSSKSLQNVNGNTYLYWFQQKPGQSPQLLIYRMSNLNSGVPDRFSGSGSGTEFTLTISSLEPEDFAVYYCMQHLEYPITFGAGTKLEIKGGGGSDIVMTQSPATLSVTPGDRVSLSCRASQSISDYLHWYQQKSHESPRLLIKYASQSISGIPSRFSGSGSGSDFTLSINSVEPEDVGVYYCQNGHSFPLTFGAGTKLELKGGSGGSGGSGGSGGSGGSGGSEVQLQQSGPELVKPGASVKISCKTSGYTFTEYTMHWVKQSHGKSLEWIGGISPNIGGTSYNQKFKGKATLTVDKSSSTAYMELRSLTSEDSAVYYCARRGGSFDYWGQGTTLTVSSDKTHTCPPCPAPELLGGPSVFLFPPKPKDTLMISRTPEVTCVVVDVSHEDPEVKFNWYVDGVEVHNAKTKPREEQYNSTYRVVSVLTVLHQDWLNGKEYKCKVSNKALPAPIEKTISKAKGQPREPQVYTLPPSREEMTKNQVSLWCLVKGFYPSDIAVEWESNGQPENNYKTTPPVLDSDGSFFLYSKLTVDKSRWQQGNVFSCSVMHEALHNHYTQKSLSLSPG

SEQ ID NO: 292 - protein, 477 aa, Artificial Sequence; identical to SEQ ID NO: 286
  artificial antibody construct

SEQ ID NO: 293 - protein, 731 aa, Artificial Sequence
  artificial antibody construct
EVQLVESGGGLVKPGGSLKLSCAASGYTFTSYVMHWVRQAPGKGLEWIGYINPYNDGTKYNEKFQGRVTISSDKSISTAYMELSSLRSEDTAMYYCARGTYYYGTRVFDYWGQGTLVTVSSGGSGGSGGSDIVMTQSPATLSLSPGERATLSCRSSKSLQNVNGNTYLYWFQQKPGQSPQLLIYRMSNLNSGVPDRFSGSGSGTEFTLTISSLEPEDFAVYYCMQHLEYPITFGAGTKLEIKGGSGGSGGSGGSGGSGGSGGSEVQLVESGGGLVKPGGSLKLSCAASGYTFTSYVMHWVRQAPGKGLEWIGYINPYNDGTKYNEKFQGRVTISSDKSISTAYMELSSLRSEDTAMYYCARGTYYYGTRVFDYWGQGTLVTVSSGGSGGSGGSDIVMTQSPATLSLSPGERATLSCRSSKSLQNVNGNTYLYWFQQKPGQSPQLLIYRMSNLNSGVPDRFSGSGSGTEFTLTISSLEPEDFAVYYCMQHLEYPITFGAGTKLEIKDKTHTCPPCPAPEFEGGPSVFLFPPKPKDTLMISRTPEVTCVVVAVSHEDPEVKFNWYVDGVEVHNAKTKPREEQYGSTYRVVSVLTVLHQDWLNGKEYKCKVSNKALPAPIEKTISKAKGQPREPQVYTLPPSREEMTKNQVSLWCLVKGFYPSDIAVEWESNGQPENNYKTTPPVLDSDGSFFLYSKLTVDKSRWQQGNVFSCSVMHEALHNHYTQKSLSLSPG

SEQ ID NO: 294 - protein, 678 aa, Artificial Sequence
  artificial antibody construct
EVQLVESGGGLVKPGGSLRLSCAASGFTFSSYGMHWVRQAPGKGLEWVAFIRYDGSNKYYADSVKGRFTISRDNSKNTLYLQMNSLRAEDTAVYYCAKDRGLGDGTYFDYWGQGTTVTVSSASTKGPSVFPLAPSSKSTSGGTAALGCLVKDYFPEPVTVSWNSGALTSGVHTFPAVLQSSGLYSLSSVVTVPSSSLGTQTYICNVNHKPSNTKVDKKVEPKSCDKTHTQVQLVQSGAEVKKPGASVKVSCKASGYTFTNYYMQWVRQAPGQGLEWMGIINPSGGVTSYAQKFQGRVTMTRDTSTSTVYMELSSLRSEDTAVYYCARGSAYYYDFADYWGQGTLVTVSSASTKGPSVFPLAPSSKSTSGGTAALGCLVKDYFPEPVTVSWNSGALTSGVHTFPAVLQSSGLYSLSSVVTVPSSSLGTQTYICNVNHKPSNTKVDKKVEPKSCDKTHTCPPCPAPEFEGGPSVFLFPPKPKDTLMISRTPEVTCVVVAVSHEDPEVKFNWYVDGVEVHNAKTKPREEQYGSTYRVVSVLTVLHQDWLNGKEYKCKVSNKALPAPIEKTISKAKGQPREPQVYTLPPSREEMTKNQVSLSCAVKGFYPSDIAVEWESNGQPENNYKTTPPVLDSDGSFFLVSKLTVDKSRWQQGNVFSCSVMHEALHNHYTQKSLSLSPG

SEQ ID NO: 295 - protein, 433 aa, Artificial Sequence
  artificial antibody construct
QSALTQPASVSGSPGQSITISCSGSSSNIGNNAVNWYQQLPGKAPKLLIYYDDLLPSGVSDRFSGSKSGTSAFLAISGLQSEDEADYYCAAWDDSLNGPVFGGGTKLTVLGQPKAAPSVTLFPPSSEELQANKATLVCLISDFYPGAVTVAWKADSSPVKAGVETTTPSKQSNNKYAASSYLSLTPEQWKSHRSYSCQVTHEGSTVEKTVAPTECSGGGGSSYELTQPLSVSVALGQTARITCGGNNIGSKSVHWYQQKPGQAPVLVIYQDKKRPSGIPERFSGSNSGNTATLTISRAQAGDEADYYCQVWDDYIVLFGGGTKLTVLGQPKAAPSVTLFPPSSEELQANKATLVCLISDFYPGAVTVAWKADSSPVKAGVETTTPSKQSNNKYAASSYLSLTPEQWKSHRSYSCQVTHEGSTVEKTVAPTECS

SEQ ID NO: 296 - protein, 731 aa, Artificial Sequence; identical to SEQ ID NO: 293
  artificial antibody construct

SEQ ID NO: 297 - protein, 674 aa, Artificial Sequence
  artificial antibody construct
EVQLQQWGAGLLKPSETLSLTCAVYGGSFSGYYWSWIRQPPGKGLEWIGEIDHSGSTNYNPSLKSRVTISVDTSKNQFSLKLSSVTAADTAVYYCARARGPWSFDPWGQGTLVTVSSASTKGPSVFPLAPSSKSTSGGTAALGCLVKDYFPEPVTVSWNSGALTSGVHTFPAVLQSSGLYSLSSVVTVPSSSLGTQTYICNVNHKPSNTKVDKKVEPKSCDKTHTQVQLVQSGAEVKKPGASVKVSCKASGYTFTNYYMQWVRQAPGQGLEWMGIINPSGGVTSYAQKFQGRVTMTRDTSTSTVYMELSSLRSEDTAVYYCARGSAYYYDFADYWGQGTLVTVSSASTKGPSVFPLAPSSKSTSGGTAALGCLVKDYFPEPVTVSWNSGALTSGVHTFPAVLQSSGLYSLSSVVTVPSSSLGTQTYICNVNHKPSNTKVDKKVEPKSCDKTHTCPPCPAPEFEGGPSVFLFPPKPKDTLMISRTPEVTCVVVAVSHEDPEVKFNWYVDGVEVHNAKTKPREEQYGSTYRVVSVLTVLHQDWLNGKEYKCKVSNKALPAPIEKTISKAKGQPREPQVYTLPPSREEMTKNQVSLSCAVKGFYPSDIAVEWESNGQPENNYKTTPPVLDSDGSFFLVSKLTVDKSRWQQGNVFSCSVMHEALHNHYTQKSLSLSPG

SEQ ID NO: 298 - protein, 430 aa, Artificial Sequence
  artificial antibody construct
DIQMTQSPSTLSASVGDRVTITCRASQSISSWLAWYQQKPGKAPKLLIYKASSLESGVPSRFSGSGSGTEFTLTISSLQPDDFATYYCQQYNSYPTFGGGTKVEIKRTVAAPSVFIFPPSDEQLKSGTASVVCLLNNFYPREAKVQWKVDNALQSGNSQESVTEQDSKDSTYSLSSTLTLSKADYEKHKVYACEVTHQGLSSPVTKSFNRGECGGGGSSYELTQPLSVSVALGQTARITCGGNNIGSKSVHWYQQKPGQAPVLVIYQDKKRPSGIPERFSGSNSGNTATLTISRAQAGDEADYYCQVWDDYIVLFGGGTKLTVLGQPKAAPSVTLFPPSSEELQANKATLVCLISDFYPGAVTVAWKADSSPVKAGVETTTPSKQSNNKYAASSYLSLTPEQWKSHRSYSCQVTHEGSTVEKTVAPTECS

SEQ ID NO: 299 - protein, 731 aa, Artificial Sequence; identical to SEQ ID NO: 293
  artificial antibody construct

SEQ ID NO: 300 - protein, 677 aa, Artificial Sequence
  artificial antibody construct
EVQLQQSGPELVKPGASVKMSCKASGYTFTDYVINWGKQRSGQGLEWIGEIYPGSGTNYYNEKFKAKATLTADKSSNIAYMQLSSLTSEDSAVYFCARRGRYGLYAMDYWGQGTSVTVSSASTKGPSVFPLAPSSKSTSGGTAALGCLVKDYFPEPVTVSWNSGALTSGVHTFPAVLQSSGLYSLSSVVTVPSSSLGTQTYICNVNHKPSNTKVDKKVEPKSCDKTHTQVQLVQSGAEVKKPGASVKVSCKASGYTFTNYYMQWVRQAPGQGLEWMGIINPSGGVTSYAQKFQGRVTMTRDTSTSTVYMELSSLRSEDTAVYYCARGSAYYYDFADYWGQGTLVTVSSASTKGPSVFPLAPSSKSTSGGTAALGCLVKDYFPEPVTVSWNSGALTSGVHTFPAVLQSSGLYSLSSVVTVPSSSLGTQTYICNVNHKPSNTKVDKKVEPKSCDKTHTCPPCPAPEFEGGPSVFLFPPKPKDTLMISRTPEVTCVVVAVSHEDPEVKFNWYVDGVEVHNAKTKPREEQYGSTYRVVSVLTVLHQDWLNGKEYKCKVSNKALPAPIEKTISKAKGQPREPQVYTLPPSREEMTKNQVSLSCAVKGFYPSDIAVEWESNGQPENNYKTTPPVLDSDGSFFLVSKLTVDKSRWQQGNVFSCSVMHEALHNHYTQKSLSLSPG

SEQ ID NO: 301 - protein, 431 aa, Artificial Sequence
  artificial antibody construct
DIQMTQTTSSLSASLGDRVTISCRASQDISNYLNWYQQKPDGTVKLLIYYTSRLHSGVPSRFSGSGSGTDYSLTINNLEQEDIATYFCQQGNTRPWTFGGGTKLEIKRTVAAPSVFIFPPSDEQLKSGTASVVCLLNNFYPREAKVQWKVDNALQSGNSQESVTEQDSKDSTYSLSSTLTLSKADYEKHKVYACEVTHQGLSSPVTKSFNRGECGGGGSSYELTQPLSVSVALGQTARITCGGNNIGSKSVHWYQQKPGQAPVLVIYQDKKRPSGIPERFSGSNSGNTATLTISRAQAGDEADYYCQVWDDYIVLFGGGTKLTVLGQPKAAPSVTLFPPSSEELQANKATLVCLISDFYPGAVTVAWKADSSPVKAGVETTTPSKQSNNKYAASSYLSLTPEQWKSHRSYSCQVTHEGSTVEKTVAPTECS

SEQ ID NO: 302 - protein, 731 aa, Artificial Sequence; identical to SEQ ID NO: 293
  artificial antibody construct

SEQ ID NO: 303 - protein, 673 aa, Artificial Sequence
  artificial antibody construct
EVQLQQSGPELVKPGASVKISCKTSGYTFTEYTMHWVKQSHGKSLEWIGGISPNIGGTSYNQKFKGKATLTVDKSSSTAYMELRSLTSEDSAVYYCARRGGSFDYWGQGTTLTVSSASTKGPSVFPLAPSSKSTSGGTAALGCLVKDYFPEPVTVSWNSGALTSGVHTFPAVLQSSGLYSLSSVVTVPSSSLGTQTYICNVNHKPSNTKVDKKVEPKSCDKTHTQVQLVQSGAEVKKPGASVKVSCKASGYTFTNYYMQWVRQAPGQGLEWMGIINPSGGVTSYAQKFQGRVTMTRDTSTSTVYMELSSLRSEDTAVYYCARGSAYYYDFADYWGQGTLVTVSSASTKGPSVFPLAPSSKSTSGGTAALGCLVKDYFPEPVTVSWNSGALTSGVHTFPAVLQSSGLYSLSSVVTVPSSSLGTQTYICNVNHKPSNTKVDKKVEPKSCDKTHTCPPCPAPEFEGGPSVFLFPPKPKDTLMISRTPEVTCVVVAVSHEDPEVKFNWYVDGVEVHNAKTKPREEQYGSTYRVVSVLTVLHQDWLNGKEYKCKVSNKALPAPIEKTISKAKGQPREPQVYTLPPSREEMTKNQVSLSCAVKGFYPSDIAVEWESNGQPENNYKTTPPVLDSDGSFFLVSKLTVDKSRWQQGNVFSCSVMHEALHNHYTQKSLSLSPG

SEQ ID NO: 304 - protein, 431 aa, Artificial Sequence
  artificial antibody construct
DIVMTQSPATLSVTPGDRVSLSCRASQSISDYLHWYQQKSHESPRLLIKYASQSISGIPSRFSGSGSGSDFTLSINSVEPEDVGVYYCQNGHSFPLTFGAGTKLELKRTVAAPSVFIFPPSDEQLKSGTASVVCLLNNFYPREAKVQWKVDNALQSGNSQESVTEQDSKDSTYSLSSTLTLSKADYEKHKVYACEVTHQGLSSPVTKSFNRGECGGGGSSYELTQPLSVSVALGQTARITCGGNNIGSKSVHWYQQKPGQAPVLVIYQDKKRPSGIPERFSGSNSGNTATLTISRAQAGDEADYYCQVWDDYIVLFGGGTKLTVLGQPKAAPSVTLFPPSSEELQANKATLVCLISDFYPGAVTVAWKADSSPVKAGVETTTPSKQSNNKYAASSYLSLTPEQWKSHRSYSCQVTHEGSTVEKTVAPTECS

SEQ ID NO: 305 - protein, 721 aa, Artificial Sequence
  artificial antibody construct
EVQLQESGPGLVKPSETLSLTCTVSGGSVSSGSYYWSWIRQPPGKGLEWIGYIYYSGSTNYNPSLKSRVTISVDTSKNQFSLKLSSVTAADTAVYYCARNPISIPAFDIWGQGTMVTVSSGGSGGSGGSQPVLTQPPSVSVAPGKTARITCGGNNIGSKSVHWYQQKPGQAPVLVIYYDSDRPSGIPERFSGSNSGNTATLTISRVEAGDEADYYCQVWDTSSDHVLFGGGTKLTVLGGSGGSGGSGGSGGSGGSGGSQVQLQESGPGLVKPSETLSLTCTVSGGSVSSGSYYWSWIRQPPGKGLEWIGYIYYSGSTNYNPSLKSRVTISVDTSKNQFSLKLSSVTAADTAVYYCARNPISIPAFDIWGQGTMVTVSSGGSGGSGGSQPVLTQPPSVSVAPGKTARITCGGNNIGSKSVHWYQQKPGQAPVLVIYYDSDRPSGIPERFSGSNSGNTATLTISRVEAGDEADYYCQVWDTSSDHVLFGGGTKLTVLDKTHTCPPCPAPEFEGGPSVFLFPPKPKDTLMISRTPEVTCVVVAVSHEDPEVKFNWYVDGVEVHNAKTKPREEQYGSTYRVVSVLTVLHQDWLNGKEYKCKVSNKALPAPIEKTISKAKGQPREPQVYTLPPSREEMTKNQVSLWCLVKGFYPSDIAVEWESNGQPENNYKTTPPVLDSDGSFFLYSKLTVDKSRWQQGNVFSCSVMHEALHNHYTQKSLSLSPG

SEQ ID NO: 306 - protein, 678 aa, Artificial Sequence; identical to SEQ ID NO: 294
  artificial antibody construct

SEQ ID NO: 307 - protein, 433 aa, Artificial Sequence; identical to SEQ ID NO: 295
  artificial antibody construct

SEQ ID NO: 308 - protein, 721 aa, Artificial Sequence; identical to SEQ ID NO: 305
  artificial antibody construct

SEQ ID NO: 309 - protein, 674 aa, Artificial Sequence; identical to SEQ ID NO: 297
  artificial antibody construct

SEQ ID NO: 310 - protein, 430 aa, Artificial Sequence; identical to SEQ ID NO: 298
  artificial antibody construct

SEQ ID NO: 311 - protein, 721 aa, Artificial Sequence; identical to SEQ ID NO: 305
  artificial antibody construct

SEQ ID NO: 312 - protein, 677 aa, Artificial Sequence; identical to SEQ ID NO: 300
  artificial antibody construct

SEQ ID NO: 313 - protein, 431 aa, Artificial Sequence; identical to SEQ ID NO: 301
  artificial antibody construct

SEQ ID NO: 314 - protein, 721 aa, Artificial Sequence; identical to SEQ ID NO: 305
  artificial antibody construct

SEQ ID NO: 315 - protein, 673 aa, Artificial Sequence; identical to SEQ ID NO: 303
  artificial antibody construct

SEQ ID NO: 316 - protein, 431 aa, Artificial Sequence; identical to SEQ ID NO: 304
  artificial antibody construct

SEQ ID NO: 317 - protein, 731 aa, Artificial Sequence
  artificial antibody construct
EVQLVESGGGLVKPGGSLKLSCAASGYTFTSYVMHWVRQAPGKGLEWIGYINPYNDGTKYNEKFQGRVTISSDKSISTAYMELSSLRSEDTAMYYCARGTYYYGTRVFDYWGQGTLVTVSSGGSGGSGGSDIVMTQSPATLSLSPGERATLSCRSSKSLQNVNGNTYLYWFQQKPGQSPQLLIYRMSNLNSGVPDRFSGSGSGTEFTLTISSLEPEDFAVYYCMQHLEYPITFGAGTKLEIKGGSGGSGGSGGSGGSGGSGGSEVQLVESGGGLVKPGGSLKLSCAASGYTFTSYVMHWVRQAPGKGLEWIGYINPYNDGTKYNEKFQGRVTISSDKSISTAYMELSSLRSEDTAMYYCARGTYYYGTRVFDYWGQGTLVTVSSGGSGGSGGSDIVMTQSPATLSLSPGERATLSCRSSKSLQNVNGNTYLYWFQQKPGQSPQLLIYRMSNLNSGVPDRFSGSGSGTEFTLTISSLEPEDFAVYYCMQHLEYPITFGAGTKLEIKDKTHTCPPCPAPELLGGPSVFLFPPKPKDTLMISRTPEVTCVVVDVSHEDPEVKFNWYVDGVEVHNAKTKPREEQYNSTYRVVSVLTVLHQDWLNGKEYKCKVSNKALPAPIEKTISKAKGQPREPQVYTLPPSREEMTKNQVSLWCLVKGFYPSDIAVEWESNGQPENNYKTTPPVLDSDGSFFLYSKLTVDKSRWQQGNVFSCSVMHEALHNHYTQKSLSLSPG

SEQ ID NO: 318 - protein, 450 aa, Artificial Sequence
  artificial antibody construct
EVQLVESGGGLVKPGGSLRLSCAASGFTFSSYGMHWVRQAPGKGLEWVAFIRYDGSNKYYADSVKGRFTISRDNSKNTLYLQMNSLRAEDTAVYYCAKDRGLGDGTYFDYWGQGTTVTVSSASTKGPSVFPLAPSSKSTSGGTAALGCLVKDYFPEPVTVSWNSGALTSGVHTFPAVLQSSGLYSLSSVVTVPSSSLGTQTYICNVNHKPSNTKVDKKVEPKSCDKTHTCPPCPAPELLGGPSVFLFPPKPKDTLMISRTPEVTCVVVDVSHEDPEVKFNWYVDGVEVHNAKTKPREEQYNSTYRVVSVLTVLHQDWLNGKEYKCKVSNKALPAPIEKTISKAKGQPREPQVYTLPPSREEMTKNQVSLSCAVKGFYPSDIAVEWESNGQPENNYKTTPPVLDSDGSFFLVSKLTVDKSRWQQGNVFSCSVMHEALHNHYTQKSLSLSPG

SEQ ID NO: 319 - protein, 216 aa, Artificial Sequence
  artificial antibody construct
QSALTQPASVSGSPGQSITISCSGSSSNIGNNAVNWYQQLPGKAPKLLIYYDDLLPSGVSDRFSGSKSGTSAFLAISGLQSEDEADYYCAAWDDSLNGPVFGGGTKLTVLGQPKAAPSVTLFPPSSEELQANKATLVCLISDFYPGAVTVAWKADSSPVKAGVETTTPSKQSNNKYAASSYLSLTPEQWKSHRSYSCQVTHEGSTVEKTVAPTECS

SEQ ID NO: 320 - protein, 731 aa, Artificial Sequence; identical to SEQ ID NO: 317
  artificial antibody construct

SEQ ID NO: 321 - protein, 446 aa, Artificial Sequence
  artificial antibody construct
EVQLQQWGAGLLKPSETLSLTCAVYGGSFSGYYWSWIRQPPGKGLEWIGEIDHSGSTNYNPSLKSRVTISVDTSKNQFSLKLSSVTAADTAVYYCARARGPWSFDPWGQGTLVTVSSASTKGPSVFPLAPSSKSTSGGTAALGCLVKDYFPEPVTVSWNSGALTSGVHTFPAVLQSSGLYSLSSVVTVPSSSLGTQTYICNVNHKPSNTKVDKKVEPKSCDKTHTCPPCPAPELLGGPSVFLFPPKPKDTLMISRTPEVTCVVVDVSHEDPEVKFNWYVDGVEVHNAKTKPREEQYNSTYRVVSVLTVLHQDWLNGKEYKCKVSNKALPAPIEKTISKAKGQPREPQVYTLPPSREEMTKNQVSLSCAVKGFYPSDIAVEWESNGQPENNYKTTPPVLDSDGSFFLVSKLTVDKSRWQQGNVFSCSVMHEALHNHYTQKSLSLSPG

SEQ ID NO: 322 - protein, 213 aa, Artificial Sequence
  artificial antibody construct
DIQMTQSPSTLSASVGDRVTITCRASQSISSWLAWYQQKPGKAPKLLIYKASSLESGVPSRFSGSGSGTEFTLTISSLQPDDFATYYCQQYNSYPTFGGGTKVEIKRTVAAPSVFIFPPSDEQLKSGTASVVCLLNNFYPREAKVQWKVDNALQSGNSQESVTEQDSKDSTYSLSSTLTLSKADYEKHKVYACEVTHQGLSSPVTKSFNRGEC

SEQ ID NO: 323 - protein, 731 aa, Artificial Sequence; identical to SEQ ID NO: 317
  artificial antibody construct

SEQ ID NO: 324 - protein, 449 aa, Artificial Sequence
  artificial antibody construct
EVQLQQSGPELVKPGASVKMSCKASGYTFTDYVINWGKQRSGQGLEWIGEIYPGSGTNYYNEKFKAKATLTADKSSNIAYMQLSSLTSEDSAVYFCARRGRYGLYAMDYWGQGTSVTVSSASTKGPSVFPLAPSSKSTSGGTAALGCLVKDYFPEPVTVSWNSGALTSGVHTFPAVLQSSGLYSLSSVVTVPSSSLGTQTYICNVNHKPSNTKVDKKVEPKSCDKTHTCPPCPAPELLGGPSVFLFPPKPKDTLMISRTPEVTCVVVDVSHEDPEVKFNWYVDGVEVHNAKTKPREEQYNSTYRVVSVLTVLHQDWLNGKEYKCKVSNKALPAPIEKTISKAKGQPREPQVYTLPPSREEMTKNQVSLSCAVKGFYPSDIAVEWESNGQPENNYKTTPPVLDSDGSFFLVSKLTVDKSRWQQGNVFSCSVMHEALHNHYTQKSLSLSPG

SEQ ID NO: 325 - protein, 214 aa, Artificial Sequence
  artificial antibody construct
DIQMTQTTSSLSASLGDRVTISCRASQDISNYLNWYQQKPDGTVKLLIYYTSRLHSGVPSRFSGSGSGTDYSLTINNLEQEDIATYFCQQGNTRPWTFGGGTKLEIKRTVAAPSVFIFPPSDEQLKSGTASVVCLLNNFYPREAKVQWKVDNALQSGNSQESVTEQDSKDSTYSLSSTLTLSKADYEKHKVYACEVTHQGLSSPVTKSFNRGEC

SEQ ID NO: 326 - protein, 731 aa, Artificial Sequence; identical to SEQ ID NO: 317
  artificial antibody construct

SEQ ID NO: 327 - protein, 445 aa, Artificial Sequence
  artificial antibody construct
EVQLQQSGPELVKPGASVKISCKTSGYTFTEYTMHWVKQSHGKSLEWIGGISPNIGGTSYNQKFKGKATLTVDKSSSTAYMELRSLTSEDSAVYYCARRGGSFDYWGQGTTLTVSSASTKGPSVFPLAPSSKSTSGGTAALGCLVKDYFPEPVTVSWNSGALTSGVHTFPAVLQSSGLYSLSSVVTVPSSSLGTQTYICNVNHKPSNTKVDKKVEPKSCDKTHTCPPCPAPELLGGPSVFLFPPKPKDTLMISRTPEVTCVVVDVSHEDPEVKFNWYVDGVEVHNAKTKPREEQYNSTYRVVSVLTVLHQDWLNGKEYKCKVSNKALPAPIEKTISKAKGQPREPQVYTLPPSREEMTKNQVSLSCAVKGFYPSDIAVEWESNGQPENNYKTTPPVLDSDGSFFLVSKLTVDKSRWQQGNVFSCSVMHEALHNHYTQKSLSLSPG

SEQ ID NO: 328 - protein, 214 aa, Artificial Sequence
  artificial antibody construct
DIVMTQSPATLSVTPGDRVSLSCRASQSISDYLHWYQQKSHESPRLLIKYASQSISGIPSRFSGSGSGSDFTLSINSVEPEDVGVYYCQNGHSFPLTFGAGTKLELKRTVAAPSVFIFPPSDEQLKSGTASVVCLLNNFYPREAKVQWKVDNALQSGNSQESVTEQDSKDSTYSLSSTLTLSKADYEKHKVYACEVTHQGLSSPVTKSFNRGEC

SEQ ID NO: 329 - protein, 729 aa, Artificial Sequence
  artificial antibody construct
EVQLVESGGGLVKPGGSLKLSCAASGYTFTSYVMHWVRQAPGKGLEWIGYINPYNDGTKYNEKFQGRVTISSDKSISTAYMELSSLRSEDTAMYYCARGTYYYGTRVFDYWGQGTLVTVSSASTKGPSVFPLAPSSKSTSGGTAALGCLVKDYFPEPVTVSWNSGALTSGVHTFPAVLQSSGLYSLSSVVTVPSSSLGTQTYICNVNHKPSNTKVDKKVEPKSCDKTHTCPPCPAPEFEGGPSVFLFPPKPKDTLMISRTPEVTCVVVAVSHEDPEVKFNWYVDGVEVHNAKTKPREEQYGSTYRVVSVLTVLHQDWLNGKEYKCKVSNKALPAPIEKTISKAKGQPREPQVYTLPPSREEMTKNQVSLWCLVKGFYPSDIAVEWESNGQPENNYKTTPPVLDSDGSFFLYSKLTVDKSRWQQGNVFSCSVMHEALHNHYTQKSLSLSPGGGGGSGGGGSGGGGSGGGGSGGGGSGGGGSQVQLVESGGGLVKPGGSLRLSCAASGFTFSSYGMHWVRQAPGKGLEWVAFIRYDGSNKYYADSVKGRFTISRDNSKNTLYLQMNSLRAEDTAVYYCAKDRGLGDGTYFDYWGQGTTVTVSSGGSGGSGGSGGSGGSGGSQSALTQPASVSGSPGQSITISCSGSSSNIGNNAVNWYQQLPGKAPKLLIYYDDLLPSGVSDRFSGSKSGTSAFLAISGLQSEDEADYYCAAWDDSLNGPVFGGGTKLTVL

SEQ ID NO: 330 - protein, 219 aa, Artificial Sequence; identical to SEQ ID NO: 162
  artificial antibody construct

SEQ ID NO: 331 - protein, 727 aa, Artificial Sequence
  artificial antibody construct
EVQLVESGGGLVKPGGSLKLSCAASGYTFTSYVMHWVRQAPGKGLEWIGYINPYNDGTKYNEKFQGRVTISSDKSISTAYMELSSLRSEDTAMYYCARGTYYYGTRVFDYWGQGTLVTVSSASTKGPSVFPLAPSSKSTSGGTAALGCLVKDYFPEPVTVSWNSGALTSGVHTFPAVLQSSGLYSLSSVVTVPSSSLGTQTYICNVNHKPSNTKVDKKVEPKSCDKTHTCPPCPAPEFEGGPSVFLFPPKPKDTLMISRTPEVTCVVVAVSHEDPEVKFNWYVDGVEVHNAKTKPREEQYGSTYRVVSVLTVLHQDWLNGKEYKCKVSNKALPAPIEKTISKAKGQPREPQVYTLPPSREEMTKNQVSLSCAVKGFYPSDIAVEWESNGQPENNYKTTPPVLDSDGSFFLVSKLTVDKSRWQQGNVFSCSVMHEALHNHYTQKSLSLSPGGGGGSGGGGSGGGGSGGGGSGGGGSGGGGSSYELTQPLSVSVALGQTARITCGGNNIGSKSVHWYQQKPGQAPVLVIYQDKKRPSGIPERFSGSNSGNTATLTISRAQAGDEADYYCQVWDDYIVLFGCGTKLTVLGGSGGSGGSGGSGGSGGSGGSQVQLVQSGAEVKKPGASVKVSCKASGYTFTNYYMQWVRQAPGQCLEWMGIINPSGGVTSYAQKFQGRVTMTRDTSTSTVYMELSSLRSEDTAVYYCARGSAYYYDFADYWGQGTLVTVSS

SEQ ID NO: 332 - protein, 721 aa, Artificial Sequence
  artificial antibody construct
EVQLVESGGGLVKPGGSLKLSCAASGYTFTSYVMHWVRQAPGKGLEWIGYINPYNDGTKYNEKFQGRVTISSDKSISTAYMELSSLRSEDTAMYYCARGTYYYGTRVFDYWGQGTLVTVSSASTKGPSVFPLAPSSKSTSGGTAALGCLVKDYFPEPVTVSWNSGALTSGVHTFPAVLQSSGLYSLSSVVTVPSSSLGTQTYICNVNHKPSNTKVDKKVEPKSCDKTHTCPPCPAPEFEGGPSVFLFPPKPKDTLMISRTPEVTCVVVAVSHEDPEVKFNWYVDGVEVHNAKTKPREEQYGSTYRVVSVLTVLHQDWLNGKEYKCKVSNKALPAPIEKTISKAKGQPREPQVYTLPPSREEMTKNQVSLWCLVKGFYPSDIAVEWESNGQPENNYKTTPPVLDSDGSFFLYSKLTVDKSRWQQGNVFSCSVMHEALHNHYTQKSLSLSPGGGGGSGGGGSGGGGSGGGGSGGGGSGGGGSQVQLQQWGAGLLKPSETLSLTCAVYGGSFSGYYWSWIRQPPGKGLEWIGEIDHSGSTNYNPSLKSRVTISVDTSKNQFSLKLSSVTAADTAVYYCARARGPWSFDPWGQGTLVTVSSGGSGGSGGSGGSGGSGGSDIQMTQSPSTLSASVGDRVTITCRASQSISSWLAWYQQKPGKAPKLLIYKASSLESGVPSRFSGSGSGTEFTLTISSLQPDDFATYYCQQYNSYPTFGGGTKVEIK

SEQ ID NO: 333 - protein, 219 aa, Artificial Sequence; identical to SEQ ID NO: 162
  artificial antibody construct

SEQ ID NO: 334 - protein, 727 aa, Artificial Sequence; identical to SEQ ID NO: 331
  artificial antibody construct

SEQ ID NO: 335 - protein, 725 aa, Artificial Sequence
  artificial antibody construct
EVQLVESGGGLVKPGGSLKLSCAASGYTFTSYVMHWVRQAPGKGLEWIGYINPYNDGTKYNEKFQGRVTISSDKSISTAYMELSSLRSEDTAMYYCARGTYYYGTRVFDYWGQGTLVTVSSASTKGPSVFPLAPSSKSTSGGTAALGCLVKDYFPEPVTVSWNSGALTSGVHTFPAVLQSSGLYSLSSVVTVPSSSLGTQTYICNVNHKPSNTKVDKKVEPKSCDKTHTCPPCPAPEFEGGPSVFLFPPKPKDTLMISRTPEVTCVVVAVSHEDPEVKFNWYVDGVEVHNAKTKPREEQYGSTYRVVSVLTVLHQDWLNGKEYKCKVSNKALPAPIEKTISKAKGQPREPQVYTLPPSREEMTKNQVSLWCLVKGFYPSDIAVEWESNGQPENNYKTTPPVLDSDGSFFLYSKLTVDKSRWQQGNVFSCSVMHEALHNHYTQKSLSLSPGGGGGSGGGGSGGGGSGGGGSGGGGSGGGGSQVQLQQSGPELVKPGASVKMSCKASGYTFTDYVINWGKQRSGQGLEWIGEIYPGSGTNYYNEKFKAKATLTADKSSNIAYMQLSSLTSEDSAVYFCARRGRYGLYAMDYWGQGTSVTVSSGGSGGSGGSGGSGGSGGSDIQMTQTTSSLSASLGDRVTISCRASQDISNYLNWYQQKPDGTVKLLIYYTSRLHSGVPSRFSGSGSGTDYSLTINNLEQEDIATYFCQQGNTRPWTFGGGTKLEIK

SEQ ID NO: 336 - protein, 219 aa, Artificial Sequence; identical to SEQ ID NO: 162
  artificial antibody construct

SEQ ID NO: 337 - protein, 727 aa, Artificial Sequence; identical to SEQ ID NO: 331
  artificial antibody construct

SEQ ID NO: 338 - protein, 721 aa, Artificial Sequence
  artificial antibody construct
EVQLVESGGGLVKPGGSLKLSCAASGYTFTSYVMHWVRQAPGKGLEWIGYINPYNDGTKYNEKFQGRVTISSDKSISTAYMELSSLRSEDTAMYYCARGTYYYGTRVFDYWGQGTLVTVSSASTKGPSVFPLAPSSKSTSGGTAALGCLVKDYFPEPVTVSWNSGALTSGVHTFPAVLQSSGLYSLSSVVTVPSSSLGTQTYICNVNHKPSNTKVDKKVEPKSCDKTHTCPPCPAPEFEGGPSVFLFPPKPKDTLMISRTPEVTCVVVAVSHEDPEVKFNWYVDGVEVHNAKTKPREEQYGSTYRVVSVLTVLHQDWLNGKEYKCKVSNKALPAPIEKTISKAKGQPREPQVYTLPPSREEMTKNQVSLWCLVKGFYPSDIAVEWESNGQPENNYKTTPPVLDSDGSFFLYSKLTVDKSRWQQGNVFSCSVMHEALHNHYTQKSLSLSPGGGGGSGGGGSGGGGSGGGGSGGGGSGGGGSEVQLQQSGPELVKPGASVKISCKTSGYTFTEYTMHWVKQSHGKSLEWIGGISPNIGGTSYNQKFKGKATLTVDKSSSTAYMELRSLTSEDSAVYYCARRGGSFDYWGQGTTLTVSSGGSGGSGGSGGSGGSGGSDIVMTQSPATLSVTPGDRVSLSCRASQSISDYLHWYQQKSHESPRLLIKYASQSISGIPSRFSGSGSGSDFTLSINSVEPEDVGVYYCQNGHSFPLTFGAGTKLELK

SEQ ID NO: 339 - protein, 219 aa, Artificial Sequence; identical to SEQ ID NO: 162
  artificial antibody construct

SEQ ID NO: 340 - protein, 727 aa, Artificial Sequence; identical to SEQ ID NO: 331
  artificial antibody construct

SEQ ID NO: 341 - protein, 729 aa, Artificial Sequence; identical to SEQ ID NO: 329
  artificial antibody construct

SEQ ID NO: 342 - protein, 219 aa, Artificial Sequence; identical to SEQ ID NO: 162
  artificial antibody construct

SEQ ID NO: 343 - protein, 730 aa, Artificial Sequence
  artificial antibody construct
EVQLVESGGGLVKPGGSLKLSCAASGYTFTSYVMHWVRQAPGKGLEWIGYINPYNDGTKYNEKFQGRVTISSDKSISTAYMELSSLRSEDTAMYYCARGTYYYGTRVFDYWGQGTLVTVSSASTKGPSVFPLAPSSKSTSGGTAALGCLVKDYFPEPVTVSWNSGALTSGVHTFPAVLQSSGLYSLSSVVTVPSSSLGTQTYICNVNHKPSNTKVDKKVEPKSCDKTHTCPPCPAPEFEGGPSVFLFPPKPKDTLMISRTPEVTCVVVAVSHEDPEVKFNWYVDGVEVHNAKTKPREEQYGSTYRVVSVLTVLHQDWLNGKEYKCKVSNKALPAPIEKTISKAKGQPREPQVYTLPPSREEMTKNQVSLSCAVKGFYPSDIAVEWESNGQPENNYKTTPPVLDSDGSFFLVSKLTVDKSRWQQGNVFSCSVMHEALHNHYTQKSLSLSPGGGGGSGGGGSGGGGSGGGGSGGGGSGGGGSDIVLTQSPASLAVSLGQRATISCKASQSVDFDGDSFMNWYQQKPGQPPKLLIYTTSNLESGIPARFSASGSGTDFTLNIHPVEEEDTATYYCQQSNEDPYTFGGGTKLELKGGSGGSGGSGGSGGSGGSGGSQVTLKESGPGILQPSQTLSLTCSFSGFSLRTSGMGVGWIRQPSGKGLEWLAHIWWDDDKRYNPALKSRLTISKDTSSNQVFLKIASVDTADTATYYCAQINPAWFAYWGQGTLVTVSA

SEQ ID NO: 344 - protein, 721 aa, Artificial Sequence; identical to SEQ ID NO: 332
  artificial antibody construct

SEQ ID NO: 345 - protein, 219 aa, Artificial Sequence; identical to SEQ ID NO: 162
  artificial antibody construct

SEQ ID NO: 346 - protein, 730 aa, Artificial Sequence; identical to SEQ ID NO: 343
  artificial antibody construct

SEQ ID NO: 347 - protein, 725 aa, Artificial Sequence; identical to SEQ ID NO: 335
  artificial antibody construct

SEQ ID NO: 348 - protein, 219 aa, Artificial Sequence; identical to SEQ ID NO: 162
  artificial antibody construct

SEQ ID NO: 349 - protein, 730 aa, Artificial Sequence; identical to SEQ ID NO: 343
  artificial antibody construct

SEQ ID NO: 350 - protein, 721 aa, Artificial Sequence; identical to SEQ ID NO: 338
  artificial antibody construct

SEQ ID NO: 351 - protein, 219 aa, Artificial Sequence; identical to SEQ ID NO: 162
  artificial antibody construct

SEQ ID NO: 352 - protein, 730 aa, Artificial Sequence; identical to SEQ ID NO: 343
  artificial antibody construct

SEQ ID NO: 353 - protein, 947 aa, Artificial Sequence
  artificial antibody construct
EVQLVESGGGLVKPGGSLKLSCAASGYTFTSYVMHWVRQAPGKGLEWIGYINPYNDGTKYNEKFQGRVTISSDKSISTAYMELSSLRSEDTAMYYCARGTYYYGTRVFDYWGQGTLVTVSSASTKGPSVFPLAPSSKSTSGGTAALGCLVKDYFPEPVTVSWNSGALTSGVHTFPAVLQSSGLYSLSSVVTVPSSSLGTQTYICNVNHKPSNTKVDKKVEPKSCDKTHTCPPCPAPEFEGGPSVFLFPPKPKDTLMISRTPEVTCVVVAVSHEDPEVKFNWYVDGVEVHNAKTKPREEQYGSTYRVVSVLTVLHQDWLNGKEYKCKVSNKALPAPIEKTISKAKGQPREPQVYTLPPSREEMTKNQVSLTCLVKGFYPSDIAVEWESNGQPENNYKTTPPVLDSDGSFFLYSKLTVDKSRWQQGNVFSCSVMHEALHNHYTQKSLSLSPGGGGGSGGGGSSYELTQPLSVSVALGQTARITCGGHNIGSKNVHWYQQKPGQAPVLVIYQDNKRPSGIPERFSGSNSGNTATLTISRAQAGDEADYYCQVWDNYNVLFGCGTKLTVLGGSGGSQVQLVESGGGLVKPGGSLRLSCAASGFTFSSYGMHWVRQAPGKGLEWVAFIRYDGSNKYYADSVKGRFTISRDNSKNTLYLQMNSLRAEDTAVYYCAKDRGLGDGTYFDYWGQGTTVTVSSGGSGGSGGSGGSGGSGGSQSALTQPASVSGSPGQSITISCSGSSSNIGNNAVNWYQQLPGKAPKLLIYYDDLLPSGVSDRFSGSKSGTSAFLAISGLQSEDEADYYCAAWDDSLNGPVFGGGTKLTVLGGSGGSQVQLVQSGAEVKKPGASVKVSCKASGYTFTSYYMHWVRQAPGQCLEWMGAIEPTYGSTSYAQKFQGRVTMTRDTSTSTVYMELSSLRSEDTAVYYCARGSAYYYDFADYWGQGTLVTVSS

SEQ ID NO: 354 - protein, 219 aa, Artificial Sequence; identical to SEQ ID NO: 162
  artificial antibody construct

SEQ ID NO: 355 - protein, 939 aa, Artificial Sequence
  artificial antibody construct
EVQLVESGGGLVKPGGSLKLSCAASGYTFTSYVMHWVRQAPGKGLEWIGYINPYNDGTKYNEKFQGRVTISSDKSISTAYMELSSLRSEDTAMYYCARGTYYYGTRVFDYWGQGTLVTVSSASTKGPSVFPLAPSSKSTSGGTAALGCLVKDYFPEPVTVSWNSGALTSGVHTFPAVLQSSGLYSLSSVVTVPSSSLGTQTYICNVNHKPSNTKVDKKVEPKSCDKTHTCPPCPAPEFEGGPSVFLFPPKPKDTLMISRTPEVTCVVVAVSHEDPEVKFNWYVDGVEVHNAKTKPREEQYGSTYRVVSVLTVLHQDWLNGKEYKCKVSNKALPAPIEKTISKAKGQPREPQVYTLPPSREEMTKNQVSLTCLVKGFYPSDIAVEWESNGQPENNYKTTPPVLDSDGSFFLYSKLTVDKSRWQQGNVFSCSVMHEALHNHYTQKSLSLSPGGGGGSGGGGSSYELTQPLSVSVALGQTARITCGGHNIGSKNVHWYQQKPGQAPVLVIYQDNKRPSGIPERFSGSNSGNTATLTISRAQAGDEADYYCQVWDNYNVLFGCGTKLTVLGGSGGSQVQLQQWGAGLLKPSETLSLTCAVYGGSFSGYYWSWIRQPPGKGLEWIGEIDHSGSTNYNPSLKSRVTISVDTSKNQFSLKLSSVTAADTAVYYCARARGPWSFDPWGQGTLVTVSSGGSGGSGGSGGSGGSGGSDIQMTQSPSTLSASVGDRVTITCRASQSISSWLAWYQQKPGKAPKLLIYKASSLESGVPSRFSGSGSGTEFTLTISSLQPDDFATYYCQQYNSYPTFGGGTKVEIKGGSGGSQVQLVQSGAEVKKPGASVKVSCKASGYTFTSYYMHWVRQAPGQCLEWMGAIEPTYGSTSYAQKFQGRVTMTRDTSTSTVYMELSSLRSEDTAVYYCARGSAYYYDFADYWGQGTLVTVSS

SEQ ID NO: 356 - protein, 219 aa, Artificial Sequence; identical to SEQ ID NO: 162
  artificial antibody construct

SEQ ID NO: 357 - protein, 943 aa, Artificial Sequence
  artificial antibody construct
EVQLVESGGGLVKPGGSLKLSCAASGYTFTSYVMHWVRQAPGKGLEWIGYINPYNDGTKYNEKFQGRVTISSDKSISTAYMELSSLRSEDTAMYYCARGTYYYGTRVFDYWGQGTLVTVSSASTKGPSVFPLAPSSKSTSGGTAALGCLVKDYFPEPVTVSWNSGALTSGVHTFPAVLQSSGLYSLSSVVTVPSSSLGTQTYICNVNHKPSNTKVDKKVEPKSCDKTHTCPPCPAPEFEGGPSVFLFPPKPKDTLMISRTPEVTCVVVAVSHEDPEVKFNWYVDGVEVHNAKTKPREEQYGSTYRVVSVLTVLHQDWLNGKEYKCKVSNKALPAPIEKTISKAKGQPREPQVYTLPPSREEMTKNQVSLTCLVKGFYPSDIAVEWESNGQPENNYKTTPPVLDSDGSFFLYSKLTVDKSRWQQGNVFSCSVMHEALHNHYTQKSLSLSPGGGGGSGGGGSSYELTQPLSVSVALGQTARITCGGHNIGSKNVHWYQQKPGQAPVLVIYQDNKRPSGIPERFSGSNSGNTATLTISRAQAGDEADYYCQVWDNYNVLFGCGTKLTVLGGSGGSQVQLQQSGPELVKPGASVKMSCKASGYTFTDYVINWGKQRSGQGLEWIGEIYPGSGTNYYNEKFKAKATLTADKSSNIAYMQLSSLTSEDSAVYFCARRGRYGLYAMDYWGQGTSVTVSSGGSGGSGGSGGSGGSGGSDIQMTQTTSSLSASLGDRVTISCRASQDISNYLNWYQQKPDGTVKLLIYYTSRLHSGVPSRFSGSGSGTDYSLTINNLEQEDIATYFCQQGNTRPWTFGGGTKLEIKGGSGGSQVQLVQSGAEVKKPGASVKVSCKASGYTFTSYYMHWVRQAPGQCLEWMGAIEPTYGSTSYAQKFQGRVTMTRDTSTSTVYMELSSLRSEDTAVYYCARGSAYYYDFADYWGQGTLVTVSS

SEQ ID NO: 358 - protein, 219 aa, Artificial Sequence; identical to SEQ ID NO: 162
  artificial antibody construct

SEQ ID NO: 359 - protein, 939 aa, Artificial Sequence
  artificial antibody construct
EVQLVESGGGLVKPGGSLKLSCAASGYTFTSYVMHWVRQAPGKGLEWIGYINPYNDGTKYNEKFQGRVTISSDKSISTAYMELSSLRSEDTAMYYCARGTYYYGTRVFDYWGQGTLVTVSSASTKGPSVFPLAPSSKSTSGGTAALGCLVKDYFPEPVTVSWNSGALTSGVHTFPAVLQSSGLYSLSSVVTVPSSSLGTQTYICNVNHKPSNTKVDKKVEPKSCDKTHTCPPCPAPEFEGGPSVFLFPPKPKDTLMISRTPEVTCVVVAVSHEDPEVKFNWYVDGVEVHNAKTKPREEQYGSTYRVVSVLTVLHQDWLNGKEYKCKVSNKALPAPIEKTISKAKGQPREPQVYTLPPSREEMTKNQVSLTCLVKGFYPSDIAVEWESNGQPENNYKTTPPVLDSDGSFFLYSKLTVDKSRWQQGNVFSCSVMHEALHNHYTQKSLSLSPGGGGGSGGGGSSYELTQPLSVSVALGQTARITCGGHNIGSKNVHWYQQKPGQAPVLVIYQDNKRPSGIPERFSGSNSGNTATLTISRAQAGDEADYYCQVWDNYNVLFGCGTKLTVLGGSGGSEVQLQQSGPELVKPGASVKISCKTSGYTFTEYTMHWVKQSHGKSLEWIGGISPNIGGTSYNQKFKGKATLTVDKSSSTAYMELRSLTSEDSAVYYCARRGGSFDYWGQGTTLTVSSGGSGGSGGSGGSGGSGGSDIVMTQSPATLSVTPGDRVSLSCRASQSISDYLHWYQQKSHESPRLLIKYASQSISGIPSRFSGSGSGSDFTLSINSVEPEDVGVYYCQNGHSFPLTFGAGTKLELKGGSGGSQVQLVQSGAEVKKPGASVKVSCKASGYTFTSYYMHWVRQAPGQCLEWMGAIEPTYGSTSYAQKFQGRVTMTRDTSTSTVYMELSSLRSEDTAVYYCARGSAYYYDFADYWGQGTLVTVSS

SEQ ID NO: 360 - protein, 219 aa, Artificial Sequence; identical to SEQ ID NO: 162
  artificial antibody construct

SEQ ID NO: 361 - protein, 950 aa, Artificial Sequence
  artificial antibody construct
EVQLVESGGGLVKPGGSLKLSCAASGYTFTSYVMHWVRQAPGKGLEWIGYINPYNDGTKYNEKFQGRVTISSDKSISTAYMELSSLRSEDTAMYYCARGTYYYGTRVFDYWGQGTLVTVSSASTKGPSVFPLAPSSKSTSGGTAALGCLVKDYFPEPVTVSWNSGALTSGVHTFPAVLQSSGLYSLSSVVTVPSSSLGTQTYICNVNHKPSNTKVDKKVEPKSCDKTHTCPPCPAPEFEGGPSVFLFPPKPKDTLMISRTPEVTCVVVAVSHEDPEVKFNWYVDGVEVHNAKTKPREEQYGSTYRVVSVLTVLHQDWLNGKEYKCKVSNKALPAPIEKTISKAKGQPREPQVYTLPPSREEMTKNQVSLTCLVKGFYPSDIAVEWESNGQPENNYKTTPPVLDSDGSFFLYSKLTVDKSRWQQGNVFSCSVMHEALHNHYTQKSLSLSPGGGGGSGGGGSDIVLTQSPASLAVSLGQRATISCKASQSVDFDGDSFMNWYQQKPGQPPKLLIYTTSNLESGIPARFSASGSGTDFTLNIHPVEEEDTATYYCQQSNEDPYTFGGGTKLELKGGSGGSQVQLVESGGGLVKPGGSLRLSCAASGFTFSSYGMHWVRQAPGKGLEWVAFIRYDGSNKYYADSVKGRFTISRDNSKNTLYLQMNSLRAEDTAVYYCAKDRGLGDGTYFDYWGQGTTVTVSSGGSGGSGGSGGSGGSGGSQSALTQPASVSGSPGQSITISCSGSSSNIGNNAVNWYQQLPGKAPKLLIYYDDLLPSGVSDRFSGSKSGTSAFLAISGLQSEDEADYYCAAWDDSLNGPVFGGGTKLTVLGGSGGSQVTLKESGPGILQPSQTLSLTCSFSGFSLRTSGMGVGWIRQPSGKGLEWLAHIWWDDDKRYNPALKSRLTISKDTSSNQVFLKIASVDTADTATYYCAQINPAWFAYWGQGTLVTVSA

SEQ ID NO: 362 - protein, 219 aa, Artificial Sequence; identical to SEQ ID NO: 162
  artificial antibody construct

SEQ ID NO: 363 - protein, 942 aa, Artificial Sequence
  artificial antibody construct
EVQLVESGGGLVKPGGSLKLSCAASGYTFTSYVMHWVRQAPGKGLEWIGYINPYNDGTKYNEKFQGRVTISSDKSISTAYMELSSLRSEDTAMYYCARGTYYYGTRVFDYWGQGTLVTVSSASTKGPSVFPLAPSSKSTSGGTAALGCLVKDYFPEPVTVSWNSGALTSGVHTFPAVLQSSGLYSLSSVVTVPSSSLGTQTYICNVNHKPSNTKVDKKVEPKSCDKTHTCPPCPAPEFEGGPSVFLFPPKPKDTLMISRTPEVTCVVVAVSHEDPEVKFNWYVDGVEVHNAKTKPREEQYGSTYRVVSVLTVLHQDWLNGKEYKCKVSNKALPAPIEKTISKAKGQPREPQVYTLPPSREEMTKNQVSLTCLVKGFYPSDIAVEWESNGQPENNYKTTPPVLDSDGSFFLYSKLTVDKSRWQQGNVFSCSVMHEALHNHYTQKSLSLSPGGGGGSGGGGSDIVLTQSPASLAVSLGQRATISCKASQSVDFDGDSFMNWYQQKPGQPPKLLIYTTSNLESGIPARFSASGSGTDFTLNIHPVEEEDTATYYCQQSNEDPYTFGGGTKLELKGGSGGSQVQLQQWGAGLLKPSETLSLTCAVYGGSFSGYYWSWIRQPPGKGLEWIGEIDHSGSTNYNPSLKSRVTISVDTSKNQFSLKLSSVTAADTAVYYCARARGPWSFDPWGQGTLVTVSSGGSGGSGGSGGSGGSGGSDIQMTQSPSTLSASVGDRVTITCRASQSISSWLAWYQQKPGKAPKLLIYKASSLESGVPSRFSGSGSGTEFTLTISSLQPDDFATYYCQQYNSYPTFGGGTKVEIKGGSGGSQVTLKESGPGILQPSQTLSLTCSFSGFSLRTSGMGVGWIRQPSGKGLEWLAHIWWDDDKRYNPALKSRLTISKDTSSNQVFLKIASVDTADTATYYCAQINPAWFAYWGQGTLVTVSA

SEQ ID NO: 364 - protein, 219 aa, Artificial Sequence; identical to SEQ ID NO: 162
  artificial antibody construct

SEQ ID NO: 365 - protein, 946 aa, Artificial Sequence
  artificial antibody construct
EVQLVESGGGLVKPGGSLKLSCAASGYTFTSYVMHWVRQAPGKGLEWIGYINPYNDGTKYNEKFQGRVTISSDKSISTAYMELSSLRSEDTAMYYCARGTYYYGTRVFDYWGQGTLVTVSSASTKGPSVFPLAPSSKSTSGGTAALGCLVKDYFPEPVTVSWNSGALTSGVHTFPAVLQSSGLYSLSSVVTVPSSSLGTQTYICNVNHKPSNTKVDKKVEPKSCDKTHTCPPCPAPEFEGGPSVFLFPPKPKDTLMISRTPEVTCVVVAVSHEDPEVKFNWYVDGVEVHNAKTKPREEQYGSTYRVVSVLTVLHQDWLNGKEYKCKVSNKALPAPIEKTISKAKGQPREPQVYTLPPSREEMTKNQVSLTCLVKGFYPSDIAVEWESNGQPENNYKTTPPVLDSDGSFFLYSKLTVDKSRWQQGNVFSCSVMHEALHNHYTQKSLSLSPGGGGGSGGGGSDIVLTQSPASLAVSLGQRATISCKASQSVDFDGDSFMNWYQQKPGQPPKLLIYTTSNLESGIPARFSASGSGTDFTLNIHPVEEEDTATYYCQQSNEDPYTFGGGTKLELKGGSGGSQVQLQQSGPELVKPGASVKMSCKASGYTFTDYVINWGKQRSGQGLEWIGEIYPGSGTNYYNEKFKAKATLTADKSSNIAYMQLSSLTSEDSAVYFCARRGRYGLYAMDYWGQGTSVTVSSGGSGGSGGSGGSGGSGGSDIQMTQTTSSLSASLGDRVTISCRASQDISNYLNWYQQKPDGTVKLLIYYTSRLHSGVPSRFSGSGSGTDYSLTINNLEQEDIATYFCQQGNTRPWTFGGGTKLEIKGGSGGSQVTLKESGPGILQPSQTLSLTCSFSGFSLRTSGMGVGWIRQPSGKGLEWLAHIWWDDDKRYNPALKSRLTISKDTSSNQVFLKIASVDTADTATYYCAQINPAWFAYWGQGTLVTVSA

SEQ ID NO: 366 - protein, 219 aa, Artificial Sequence; identical to SEQ ID NO: 162
  artificial antibody construct

SEQ ID NO: 367 - protein, 942 aa, Artificial Sequence
  artificial antibody construct
EVQLVESGGGLVKPGGSLKLSCAASGYTFTSYVMHWVRQAPGKGLEWIGYINPYNDGTKYNEKFQGRVTISSDKSISTAYMELSSLRSEDTAMYYCARGTYYYGTRVFDYWGQGTLVTVSSASTKGPSVFPLAPSSKSTSGGTAALGCLVKDYFPEPVTVSWNSGALTSGVHTFPAVLQSSGLYSLSSVVTVPSSSLGTQTYICNVNHKPSNTKVDKKVEPKSCDKTHTCPPCPAPEFEGGPSVFLFPPKPKDTLMISRTPEVTCVVVAVSHEDPEVKFNWYVDGVEVHNAKTKPREEQYGSTYRVVSVLTVLHQDWLNGKEYKCKVSNKALPAPIEKTISKAKGQPREPQVYTLPPSREEMTKNQVSLTCLVKGFYPSDIAVEWESNGQPENNYKTTPPVLDSDGSFFLYSKLTVDKSRWQQGNVFSCSVMHEALHNHYTQKSLSLSPGGGGGSGGGGSDIVLTQSPASLAVSLGQRATISCKASQSVDFDGDSFMNWYQQKPGQPPKLLIYTTSNLESGIPARFSASGSGTDFTLNIHPVEEEDTATYYCQQSNEDPYTFGGGTKLELKGGSGGSEVQLQQSGPELVKPGASVKISCKTSGYTFTEYTMHWVKQSHGKSLEWIGGISPNIGGTSYNQKFKGKATLTVDKSSSTAYMELRSLTSEDSAVYYCARRGGSFDYWGQGTTLTVSSGGSGGSGGSGGSGGSGGSDIVMTQSPATLSVTPGDRVSLSCRASQSISDYLHWYQQKSHESPRLLIKYASQSISGIPSRFSGSGSGSDFTLSINSVEPEDVGVYYCQNGHSFPLTFGAGTKLELKGGSGGSQVTLKESGPGILQPSQTLSLTCSFSGFSLRTSGMGVGWIRQPSGKGLEWLAHIWWDDDKRYNPALKSRLTISKDTSSNQVFLKIASVDTADTATYYCAQINPAWFAYWGQGTLVTVSA

SEQ ID NO: 368 - protein, 219 aa, Artificial Sequence; identical to SEQ ID NO: 162
  artificial antibody construct

SEQ ID NO: 369 - protein, 952 aa, Artificial Sequence
  artificial antibody construct
EVQLVESGGGLVKPGGSLKLSCAASGYTFTSYVMHWVRQAPGKGLEWIGYINPYNDGTKYNEKFQGRVTISSDKSISTAYMELSSLRSEDTAMYYCARGTYYYGTRVFDYWGQGTLVTVSSASTKGPSVFPLAPSSKSTSGGTAALGCLVKDYFPEPVTVSWNSGALTSGVHTFPAVLQSSGLYSLSSVVTVPSSSLGTQTYICNVNHKPSNTKVDKKVEPKSCDKTHTCPPCPAPEFEGGPSVFLFPPKPKDTLMISRTPEVTCVVVAVSHEDPEVKFNWYVDGVEVHNAKTKPREEQYGSTYRVVSVLTVLHQDWLNGKEYKCKVSNKALPAPIEKTISKAKGQPREPQVYTLPPSREEMTKNQVSLWCLVKGFYPSDIAVEWESNGQPENNYKTTPPVLDSDGSFFLYSKLTVDKSRWQQGNVFSCSVMHEALHNHYTQKSLSLSPGGGGGSGGGGSQSALTQPASVSGSPGQSITISCSGSSSNIGNNAVNWYQQLPGKAPKLLIYYDDLLPSGVSDRFSGSKSGTSAFLAISGLQSEDEADYYCAAWDDSLNGPVFGGGTKLTVLGGSGGSQVQLVESGGGLVKPGGSLRLSCAASGFTFSSYGMHWVRQAPGKGLEWVAFIRYDGSNKYYADSVKGRFTISRDNSKNTLYLQMNSLRAEDTAVYYCAKDRGLGDGTYFDYWGQGTTVTVSSGGSGGSGGSGGSGGSGGSQSALTQPASVSGSPGQSITISCSGSSSNIGNNAVNWYQQLPGKAPKLLIYYDDLLPSGVSDRFSGSKSGTSAFLAISGLQSEDEADYYCAAWDDSLNGPVFGGGTKLTVLGGSGGSQVQLVESGGGLVKPGGSLRLSCAASGFTFSSYGMHWVRQAPGKGLEWVAFIRYDGSNKYYADSVKGRFTISRDNSKNTLYLQMNSLRAEDTAVYYCAKDRGLGDGTYFDYWGQGTTVTVSS

SEQ ID NO: 370 - protein, 219 aa, Artificial Sequence; identical to SEQ ID NO: 162
  artificial antibody construct

SEQ ID NO: 371 - protein, 942 aa, Artificial Sequence
  artificial antibody construct
EVQLVESGGGLVKPGGSLKLSCAASGYTFTSYVMHWVRQAPGKGLEWIGYINPYNDGTKYNEKFQGRVTISSDKSISTAYMELSSLRSEDTAMYYCARGTYYYGTRVFDYWGQGTLVTVSSASTKGPSVFPLAPSSKSTSGGTAALGCLVKDYFPEPVTVSWNSGALTSGVHTFPAVLQSSGLYSLSSVVTVPSSSLGTQTYICNVNHKPSNTKVDKKVEPKSCDKTHTCPPCPAPEFEGGPSVFLFPPKPKDTLMISRTPEVTCVVVAVSHEDPEVKFNWYVDGVEVHNAKTKPREEQYGSTYRVVSVLTVLHQDWLNGKEYKCKVSNKALPAPIEKTISKAKGQPREPQVYTLPPSREEMTKNQVSLSCAVKGFYPSDIAVEWESNGQPENNYKTTPPVLDSDGSFFLVSKLTVDKSRWQQGNVFSCSVMHEALHNHYTQKSLSLSPGGGGGSGGGGSSYELTQPLSVSVALGQTARITCGGHNIGSKNVHWYQQKPGQAPVLVIYQDNKRPSGIPERFSGSNSGNTATLTISRAQAGDEADYYCQVWDNYNVLFGCGTKLTVLGGSGGSQVQLVQSGAEVKKPGASVKVSCKASGYTFTSYYMHWVRQAPGQCLEWMGAIEPTYGSTSYAQKFQGRVTMTRDTSTSTVYMELSSLRSEDTAVYYCARGSAYYYDFADYWGQGTLVTVSSGGSGGSGGSGGSGGSGGSSYELTQPLSVSVALGQTARITCGGHNIGSKNVHWYQQKPGQAPVLVIYQDNKRPSGIPERFSGSNSGNTATLTISRAQAGDEADYYCQVWDNYNVLFGCGTKLTVLGGSGGSQVQLVQSGAEVKKPGASVKVSCKASGYTFTSYYMHWVRQAPGQCLEWMGAIEPTYGSTSYAQKFQGRVTMTRDTSTSTVYMELSSLRSEDTAVYYCARGSAYYYDFADYWGQGTLVTVSS

SEQ ID NO: 372 - protein, 936 aa, Artificial Sequence
  artificial antibody construct
EVQLVESGGGLVKPGGSLKLSCAASGYTFTSYVMHWVRQAPGKGLEWIGYINPYNDGTKYNEKFQGRVTISSDKSISTAYMELSSLRSEDTAMYYCARGTYYYGTRVFDYWGQGTLVTVSSASTKGPSVFPLAPSSKSTSGGTAALGCLVKDYFPEPVTVSWNSGALTSGVHTFPAVLQSSGLYSLSSVVTVPSSSLGTQTYICNVNHKPSNTKVDKKVEPKSCDKTHTCPPCPAPEFEGGPSVFLFPPKPKDTLMISRTPEVTCVVVAVSHEDPEVKFNWYVDGVEVHNAKTKPREEQYGSTYRVVSVLTVLHQDWLNGKEYKCKVSNKALPAPIEKTISKAKGQPREPQVYTLPPSREEMTKNQVSLWCLVKGFYPSDIAVEWESNGQPENNYKTTPPVLDSDGSFFLYSKLTVDKSRWQQGNVFSCSVMHEALHNHYTQKSLSLSPGGGGGSGGGGSDIQMTQSPSTLSASVGDRVTITCRASQSISSWLAWYQQKPGKAPKLLIYKASSLESGVPSRFSGSGSGTEFTLTISSLQPDDFATYYCQQYNSYPTFGGGTKVEIKGGSGGSQVQLQQWGAGLLKPSETLSLTCAVYGGSFSGYYWSWIRQPPGKGLEWIGEIDHSGSTNYNPSLKSRVTISVDTSKNQFSLKLSSVTAADTAVYYCARARGPWSFDPWGQGTLVTVSSGGSGGSGGSGGSGGSGGSDIQMTQSPSTLSASVGDRVTITCRASQSISSWLAWYQQKPGKAPKLLIYKASSLESGVPSRFSGSGSGTEFTLTISSLQPDDFATYYCQQYNSYPTFGGGTKVEIKGGSGGSQVQLQQWGAGLLKPSETLSLTCAVYGGSFSGYYWSWIRQPPGKGLEWIGEIDHSGSTNYNPSLKSRVTISVDTSKNQFSLKLSSVTAADTAVYYCARARGPWSFDPWGQGTLVTVSS

SEQ ID NO: 373 - protein, 219 aa, Artificial Sequence; identical to SEQ ID NO: 162
  artificial antibody construct

SEQ ID NO: 374 - protein, 942 aa, Artificial Sequence; identical to SEQ ID NO: 371
  artificial antibody construct

SEQ ID NO: 375 - protein, 944 aa, Artificial Sequence
  artificial antibody construct
EVQLVESGGGLVKPGGSLKLSCAASGYTFTSYVMHWVRQAPGKGLEWIGYINPYNDGTKYNEKFQGRVTISSDKSISTAYMELSSLRSEDTAMYYCARGTYYYGTRVFDYWGQGTLVTVSSASTKGPSVFPLAPSSKSTSGGTAALGCLVKDYFPEPVTVSWNSGALTSGVHTFPAVLQSSGLYSLSSVVTVPSSSLGTQTYICNVNHKPSNTKVDKKVEPKSCDKTHTCPPCPAPEFEGGPSVFLFPPKPKDTLMISRTPEVTCVVVAVSHEDPEVKFNWYVDGVEVHNAKTKPREEQYGSTYRVVSVLTVLHQDWLNGKEYKCKVSNKALPAPIEKTISKAKGQPREPQVYTLPPSREEMTKNQVSLWCLVKGFYPSDIAVEWESNGQPENNYKTTPPVLDSDGSFFLYSKLTVDKSRWQQGNVFSCSVMHEALHNHYTQKSLSLSPGGGGGSGGGGSDIQMTQTTSSLSASLGDRVTISCRASQDISNYLNWYQQKPDGTVKLLIYYTSRLHSGVPSRFSGSGSGTDYSLTINNLEQEDIATYFCQQGNTRPWTFGGGTKLEIKGGSGGSQVQLQQSGPELVKPGASVKMSCKASGYTFTDYVINWGKQRSGQGLEWIGEIYPGSGTNYYNEKFKAKATLTADKSSNIAYMQLSSLTSEDSAVYFCARRGRYGLYAMDYWGQGTSVTVSSGGSGGSGGSGGSGGSGGSDIQMTQTTSSLSASLGDRVTISCRASQDISNYLNWYQQKPDGTVKLLIYYTSRLHSGVPSRFSGSGSGTDYSLTINNLEQEDIATYFCQQGNTRPWTFGGGTKLEIKGGSGGSQVQLQQSGPELVKPGASVKMSCKASGYTFTDYVINWGKQRSGQGLEWIGEIYPGSGTNYYNEKFKAKATLTADKSSNIAYMQLSSLTSEDSAVYFCARRGRYGLYAMDYWGQGTSVTVSS

SEQ ID NO: 376 - protein, 219 aa, Artificial Sequence; identical to SEQ ID NO: 162
  artificial antibody construct

SEQ ID NO: 377 - protein, 942 aa, Artificial Sequence; identical to SEQ ID NO: 371
  artificial antibody construct

SEQ ID NO: 378 - protein, 936 aa, Artificial Sequence
  artificial antibody construct
EVQLVESGGGLVKPGGSLKLSCAASGYTFTSYVMHWVRQAPGKGLEWIGYINPYNDGTKYNEKFQGRVTISSDKSISTAYMELSSLRSEDTAMYYCARGTYYYGTRVFDYWGQGTLVTVSSASTKGPSVFPLAPSSKSTSGGTAALGCLVKDYFPEPVTVSWNSGALTSGVHTFPAVLQSSGLYSLSSVVTVPSSSLGTQTYICNVNHKPSNTKVDKKVEPKSCDKTHTCPPCPAPEFEGGPSVFLFPPKPKDTLMISRTPEVTCVVVAVSHEDPEVKFNWYVDGVEVHNAKTKPREEQYGSTYRVVSVLTVLHQDWLNGKEYKCKVSNKALPAPIEKTISKAKGQPREPQVYTLPPSREEMTKNQVSLWCLVKGFYPSDIAVEWESNGQPENNYKTTPPVLDSDGSFFLYSKLTVDKSRWQQGNVFSCSVMHEALHNHYTQKSLSLSPGGGGGSGGGGSDIVMTQSPATLSVTPGDRVSLSCRASQSISDYLHWYQQKSHESPRLLIKYASQSISGIPSRFSGSGSGSDFTLSINSVEPEDVGVYYCQNGHSFPLTFGAGTKLELKGGSGGSEVQLQQSGPELVKPGASVKISCKTSGYTFTEYTMHWVKQSHGKSLEWIGGISPNIGGTSYNQKFKGKATLTVDKSSSTAYMELRSLTSEDSAVYYCARRGGSFDYWGQGTTLTVSSGGSGGSGGSGGSGGSGGSDIVMTQSPATLSVTPGDRVSLSCRASQSISDYLHWYQQKSHESPRLLIKYASQSISGIPSRFSGSGSGSDFTLSINSVEPEDVGVYYCQNGHSFPLTFGAGTKLELKGGSGGSEVQLQQSGPELVKPGASVKISCKTSGYTFTEYTMHWVKQSHGKSLEWIGGISPNIGGTSYNQKFKGKATLTVDKSSSTAYMELRSLTSEDSAVYYCARRGGSFDYWGQGTTLTVSS

SEQ ID NO: 379 - protein, 219 aa, Artificial Sequence; identical to SEQ ID NO: 162
  artificial antibody construct

SEQ ID NO: 380 - protein, 942 aa, Artificial Sequence; identical to SEQ ID NO: 371
  artificial antibody construct

SEQ ID NO: 381 - protein, 952 aa, Artificial Sequence
  artificial antibody construct
EVQLVESGGGLVKPGGSLKLSCAASGYTFTSYVMHWVRQAPGKGLEWIGYINPYNDGTKYNEKFQGRVTISSDKSISTAYMELSSLRSEDTAMYYCARGTYYYGTRVFDYWGQGTLVTVSSASTKGPSVFPLAPSSKSTSGGTAALGCLVKDYFPEPVTVSWNSGALTSGVHTFPAVLQSSGLYSLSSVVTVPSSSLGTQTYICNVNHKPSNTKVDKKVEPKSCDKTHTCPPCPAPELLGGPSVFLFPPKPKDTLMISRTPEVTCVVVDVSHEDPEVKFNWYVDGVEVHNAKTKPREEQYNSTYRVVSVLTVLHQDWLNGKEYKCKVSNKALPAPIEKTISKAKGQPREPQVYTLPPSREEMTKNQVSLWCLVKGFYPSDIAVEWESNGQPENNYKTTPPVLDSDGSFFLYSKLTVDKSRWQQGNVFSCSVMHEALHNHYTQKSLSLSPGGGGGSGGGGSQSALTQPASVSGSPGQSITISCSGSSSNIGNNAVNWYQQLPGKAPKLLIYYDDLLPSGVSDRFSGSKSGTSAFLAISGLQSEDEADYYCAAWDDSLNGPVFGGGTKLTVLGGSGGSQVQLVESGGGLVKPGGSLRLSCAASGFTFSSYGMHWVRQAPGKGLEWVAFIRYDGSNKYYADSVKGRFTISRDNSKNTLYLQMNSLRAEDTAVYYCAKDRGLGDGTYFDYWGQGTTVTVSSGGSGGSGGSGGSGGSGGSQSALTQPASVSGSPGQSITISCSGSSSNIGNNAVNWYQQLPGKAPKLLIYYDDLLPSGVSDRFSGSKSGTSAFLAISGLQSEDEADYYCAAWDDSLNGPVFGGGTKLTVLGGSGGSQVQLVESGGGLVKPGGSLRLSCAASGFTFSSYGMHWVRQAPGKGLEWVAFIRYDGSNKYYADSVKGRFTISRDNSKNTLYLQMNSLRAEDTAVYYCAKDRGLGDGTYFDYWGQGTTVTVSS

SEQ ID NO: 382 - protein, 219 aa, Artificial Sequence; identical to SEQ ID NO: 162
  artificial antibody construct

SEQ ID NO: 383 - protein, 450 aa, Artificial Sequence
  artificial antibody construct
EVQLVESGGGLVKPGGSLKLSCAASGYTFTSYVMHWVRQAPGKGLEWIGYINPYNDGTKYNEKFQGRVTISSDKSISTAYMELSSLRSEDTAMYYCARGTYYYGTRVFDYWGQGTLVTVSSASTKGPSVFPLAPSSKSTSGGTAALGCLVKDYFPEPVTVSWNSGALTSGVHTFPAVLQSSGLYSLSSVVTVPSSSLGTQTYICNVNHKPSNTKVDKKVEPKSCDKTHTCPPCPAPELLGGPSVFLFPPKPKDTLMISRTPEVTCVVVDVSHEDPEVKFNWYVDGVEVHNAKTKPREEQYNSTYRVVSVLTVLHQDWLNGKEYKCKVSNKALPAPIEKTISKAKGQPREPQVYTLPPSREEMTKNQVSLSCAVKGFYPSDIAVEWESNGQPENNYKTTPPVLDSDGSFFLVSKLTVDKSRWQQGNVFSCSVMHEALHNHYTQKSLSLSPG

SEQ ID NO: 384 - protein, 936 aa, Artificial Sequence
  artificial antibody construct
EVQLVESGGGLVKPGGSLKLSCAASGYTFTSYVMHWVRQAPGKGLEWIGYINPYNDGTKYNEKFQGRVTISSDKSISTAYMELSSLRSEDTAMYYCARGTYYYGTRVFDYWGQGTLVTVSSASTKGPSVFPLAPSSKSTSGGTAALGCLVKDYFPEPVTVSWNSGALTSGVHTFPAVLQSSGLYSLSSVVTVPSSSLGTQTYICNVNHKPSNTKVDKKVEPKSCDKTHTCPPCPAPELLGGPSVFLFPPKPKDTLMISRTPEVTCVVVDVSHEDPEVKFNWYVDGVEVHNAKTKPREEQYNSTYRVVSVLTVLHQDWLNGKEYKCKVSNKALPAPIEKTISKAKGQPREPQVYTLPPSREEMTKNQVSLWCLVKGFYPSDIAVEWESNGQPENNYKTTPPVLDSDGSFFLYSKLTVDKSRWQQGNVFSCSVMHEALHNHYTQKSLSLSPGGGGGSGGGGSDIQMTQSPSTLSASVGDRVTITCRASQSISSWLAWYQQKPGKAPKLLIYKASSLESGVPSRFSGSGSGTEFTLTISSLQPDDFATYYCQQYNSYPTFGGGTKVEIKGGSGGSQVQLQQWGAGLLKPSETLSLTCAVYGGSFSGYYWSWIRQPPGKGLEWIGEIDHSGSTNYNPSLKSRVTISVDTSKNQFSLKLSSVTAADTAVYYCARARGPWSFDPWGQGTLVTVSSGGSGGSGGSGGSGGSGGSDIQMTQSPSTLSASVGDRVTITCRASQSISSWLAWYQQKPGKAPKLLIYKASSLESGVPSRFSGSGSGTEFTLTISSLQPDDFATYYCQQYNSYPTFGGGTKVEIKGGSGGSQVQLQQWGAGLLKPSETLSLTCAVYGGSFSGYYWSWIRQPPGKGLEWIGEIDHSGSTNYNPSLKSRVTISVDTSKNQFSLKLSSVTAADTAVYYCARARGPWSFDPWGQGTLVTVSS

SEQ ID NO: 385 - protein, 219 aa, Artificial Sequence; identical to SEQ ID NO: 162
  artificial antibody construct

SEQ ID NO: 386 - protein, 450 aa, Artificial Sequence; identical to SEQ ID NO: 383
  artificial antibody construct

SEQ ID NO: 387 - protein, 944 aa, Artificial Sequence
  artificial antibody construct
EVQLVESGGGLVKPGGSLKLSCAASGYTFTSYVMHWVRQAPGKGLEWIGYINPYNDGTKYNEKFQGRVTISSDKSISTAYMELSSLRSEDTAMYYCARGTYYYGTRVFDYWGQGTLVTVSSASTKGPSVFPLAPSSKSTSGGTAALGCLVKDYFPEPVTVSWNSGALTSGVHTFPAVLQSSGLYSLSSVVTVPSSSLGTQTYICNVNHKPSNTKVDKKVEPKSCDKTHTCPPCPAPELLGGPSVFLFPPKPKDTLMISRTPEVTCVVVDVSHEDPEVKFNWYVDGVEVHNAKTKPREEQYNSTYRVVSVLTVLHQDWLNGKEYKCKVSNKALPAPIEKTISKAKGQPREPQVYTLPPSREEMTKNQVSLWCLVKGFYPSDIAVEWESNGQPENNYKTTPPVLDSDGSFFLYSKLTVDKSRWQQGNVFSCSVMHEALHNHYTQKSLSLSPGGGGGSGGGGSDIQMTQTTSSLSASLGDRVTISCRASQDISNYLNWYQQKPDGTVKLLIYYTSRLHSGVPSRFSGSGSGTDYSLTINNLEQEDIATYFCQQGNTRPWTFGGGTKLEIKGGSGGSQVQLQQSGPELVKPGASVKMSCKASGYTFTDYVINWGKQRSGQGLEWIGEIYPGSGTNYYNEKFKAKATLTADKSSNIAYMQLSSLTSEDSAVYFCARRGRYGLYAMDYWGQGTSVTVSSGGSGGSGGSGGSGGSGGSDIQMTQTTSSLSASLGDRVTISCRASQDISNYLNWYQQKPDGTVKLLIYYTSRLHSGVPSRFSGSGSGTDYSLTINNLEQEDIATYFCQQGNTRPWTFGGGTKLEIKGGSGGSQVQLQQSGPELVKPGASVKMSCKASGYTFTDYVINWGKQRSGQGLEWIGEIYPGSGTNYYNEKFKAKATLTADKSSNIAYMQLSSLTSEDSAVYFCARRGRYGLYAMDYWGQGTSVTVSS

SEQ ID NO: 388 - protein, 219 aa, Artificial Sequence; identical to SEQ ID NO: 162
  artificial antibody construct

SEQ ID NO: 389 - protein, 450 aa, Artificial Sequence; identical to SEQ ID NO: 383
  artificial antibody construct

SEQ ID NO: 390 - protein, 936 aa, Artificial Sequence
  artificial antibody construct
EVQLVESGGGLVKPGGSLKLSCAASGYTFTSYVMHWVRQAPGKGLEWIGYINPYNDGTKYNEKFQGRVTISSDKSISTAYMELSSLRSEDTAMYYCARGTYYYGTRVFDYWGQGTLVTVSSASTKGPSVFPLAPSSKSTSGGTAALGCLVKDYFPEPVTVSWNSGALTSGVHTFPAVLQSSGLYSLSSVVTVPSSSLGTQTYICNVNHKPSNTKVDKKVEPKSCDKTHTCPPCPAPELLGGPSVFLFPPKPKDTLMISRTPEVTCVVVDVSHEDPEVKFNWYVDGVEVHNAKTKPREEQYNSTYRVVSVLTVLHQDWLNGKEYKCKVSNKALPAPIEKTISKAKGQPREPQVYTLPPSREEMTKNQVSLWCLVKGFYPSDIAVEWESNGQPENNYKTTPPVLDSDGSFFLYSKLTVDKSRWQQGNVFSCSVMHEALHNHYTQKSLSLSPGGGGGSGGGGSDIVMTQSPATLSVTPGDRVSLSCRASQSISDYLHWYQQKSHESPRLLIKYASQSISGIPSRFSGSGSGSDFTLSINSVEPEDVGVYYCQNGHSFPLTFGAGTKLELKGGSGGSEVQLQQSGPELVKPGASVKISCKTSGYTFTEYTMHWVKQSHGKSLEWIGGISPNIGGTSYNQKFKGKATLTVDKSSSTAYMELRSLTSEDSAVYYCARRGGSFDYWGQGTTLTVSSGGSGGSGGSGGSGGSGGSDIVMTQSPATLSVTPGDRVSLSCRASQSISDYLHWYQQKSHESPRLLIKYASQSISGIPSRFSGSGSGSDFTLSINSVEPEDVGVYYCQNGHSFPLTFGAGTKLELKGGSGGSEVQLQQSGPELVKPGASVKISCKTSGYTFTEYTMHWVKQSHGKSLEWIGGISPNIGGTSYNQKFKGKATLTVDKSSSTAYMELRSLTSEDSAVYYCARRGGSFDYWGQGTTLTVSS

SEQ ID NO: 391 - protein, 219 aa, Artificial Sequence; identical to SEQ ID NO: 162
  artificial antibody construct

SEQ ID NO: 392 - protein, 450 aa, Artificial Sequence; identical to SEQ ID NO: 383
  artificial antibody construct

SEQ ID NO: 393 - protein, 446 aa, Artificial Sequence
  artificial antibody construct
DIVMTQSPATLSLSPGERATLSCRSSKSLQNVNGNTYLYWFQQKPGQSPQLLIYRMSNLNSGVPDRFSGSGSGTEFTLTISSLEPEDFAVYYCMQHLEYPITFGAGTKLEIKRTVAAPSVFIFPPSDEQLKSGTASVVCLLNNFYPREAKVQWKVDNALQSGNSQESVTEQDSKDSTYSLSSTLTLSKADYEKHKVYACEVTHQGLSSPVTKSFNRGECDKTHTCPPCPAPELLGGPSVFLFPPKPKDTLMISRTPEVTCVVVDVSHEDPEVKFNWYVDGVEVHNAKTKPREEQYNSTYRVVSVLTVLHQDWLNGKEYKCKVSNKALPAPIEKTISKAKGQPREPQVYTLPPSREEMTKNQVSLWCLVKGFYPSDIAVEWESNGQPENNYKTTPPVLDSDGSFFLYSKLTVDKSRWQQGNVFSCSVMHEALHNHYTQKSLSLSPGK

SEQ ID NO: 394 - protein, 681 aa, Artificial Sequence
  artificial antibody construct
EVQLVESGGGLVKPGGSLKLSCAASGYTFTSYVMHWVRQAPGKGLEWIGYINPYNDGTKYNEKFQGRVTISSDKSISTAYMELSSLRSEDTAMYYCARGTYYYGTRVFDYWGQGTLVTVSSASTKGPSVFPLAPSSKSTSGGTAALGCLVKDYFPEPVTVSWNSGALTSGVHTFPAVLQSSGLYSLSSVVTVPSSSLGTQTYICNVNHKPSNTKVDKKVEPKSCDKTHTCPPCPAPELLGGPSVFLFPPKPKDTLMISRTPEVTCVVVDVSHEDPEVKFNWYVDGVEVHNAKTKPREEQYNSTYRVVSVLTVLHQDWLNGKEYKCKVSNKALPAPIEKTISKAKGQPREPQVYTLPPSREEMTKNQVSLSCAVKGFYPSDIAVEWESNGQPENNYKTTPPVLDSDGSFFLVSKLTVDKSRWQQGNVFSCSVMHEALHNHYTQKSLSLSPGSTGSQVQLQQSGPELVKPGASVKMSCKASGYTFTDYVINWGKQRSGQGLEWIGEIYPGSGTNYYNEKFKAKATLTADKSSNIAYMQLSSLTSEDSAVYFCARRGRYGLYAMDYWGQGTSVTVSSRTVAAPSVFIFPPSDEQLKSGTASVVCLLNNFYPREAKVQWKVDNALQSGNSQESVTEQDSKDSTYSLSSTLTLSKADYEKHKVYACEVTHQGLSSPVTKSFNRGEC

SEQ ID NO: 395 - protein, 214 aa, Artificial Sequence
  artificial antibody construct
DIQMTQTTSSLSASLGDRVTISCRASQDISNYLNWYQQKPDGTVKLLIYYTSRLHSGVPSRFSGSGSGTDYSLTINNLEQEDIATYFCQQGNTRPWTFGGGTKLEIKASTKGPSVFPLAPSSKSTSGGTAALGCLVKDYFPEPVTVSWNSGALTSGVHTFPAVLQSSGLYSLSSVVTVPSSSLGTQTYICNVNHKPSNTKVDKKVEPKSCDKTH

SEQ ID NO: 396 - protein, 446 aa, Artificial Sequence; identical to SEQ ID NO: 393
  artificial antibody construct

SEQ ID NO: 397 - protein, 677 aa, Artificial Sequence
  artificial antibody construct
EVQLVESGGGLVKPGGSLKLSCAASGYTFTSYVMHWVRQAPGKGLEWIGYINPYNDGTKYNEKFQGRVTISSDKSISTAYMELSSLRSEDTAMYYCARGTYYYGTRVFDYWGQGTLVTVSSASTKGPSVFPLAPSSKSTSGGTAALGCLVKDYFPEPVTVSWNSGALTSGVHTFPAVLQSSGLYSLSSVVTVPSSSLGTQTYICNVNHKPSNTKVDKKVEPKSCDKTHTCPPCPAPELLGGPSVFLFPPKPKDTLMISRTPEVTCVVVDVSHEDPEVKFNWYVDGVEVHNAKTKPREEQYNSTYRVVSVLTVLHQDWLNGKEYKCKVSNKALPAPIEKTISKAKGQPREPQVYTLPPSREEMTKNQVSLSCAVKGFYPSDIAVEWESNGQPENNYKTTPPVLDSDGSFFLVSKLTVDKSRWQQGNVFSCSVMHEALHNHYTQKSLSLSPGSTGSEVQLQQSGPELVKPGASVKISCKTSGYTFTEYTMHWVKQSHGKSLEWIGGISPNIGGTSYNQKFKGKATLTVDKSSSTAYMELRSLTSEDSAVYYCARRGGSFDYWGQGTTLTVSSRTVAAPSVFIFPPSDEQLKSGTASVVCLLNNFYPREAKVQWKVDNALQSGNSQESVTEQDSKDSTYSLSSTLTLSKADYEKHKVYACEVTHQGLSSPVTKSFNRGEC

SEQ ID NO: 398 - protein, 214 aa, Artificial Sequence
  artificial antibody construct
DIVMTQSPATLSVTPGDRVSLSCRASQSISDYLHWYQQKSHESPRLLIKYASQSISGIPSRFSGSGSGSDFTLSINSVEPEDVGVYYCQNGHSFPLTFGAGTKLELKASTKGPSVFPLAPSSKSTSGGTAALGCLVKDYFPEPVTVSWNSGALTSGVHTFPAVLQSSGLYSLSSVVTVPSSSLGTQTYICNVNHKPSNTKVDKKVEPKSCDKTH

SEQ ID NO: 399 - protein, 441 aa, Artificial Sequence
  artificial antibody construct
QPVLTQPPSVSVAPGKTARITCGGNNIGSKSVHWYQQKPGQAPVLVIYYDSDRPSGIPERFSGSNSGNTATLTISRVEAGDEADYYCQVWDTSSDHVLFGGGTKLTVLGQPKAAPSVTLFPPSSEELQANKATLVCLISDFYPGAVTVAWKADSSPVKAGVETTTPSKQSNNKYAASSYLSLTPEQWKSHRSYSCQVTHEGSTVEKTVAPTECSDKTHTCPPCPAPELLGGPSVFLFPPKPKDTLMISRTPEVTCVVVDVSHEDPEVKFNWYVDGVEVHNAKTKPREEQYNSTYRVVSVLTVLHQDWLNGKEYKCKVSNKALPAPIEKTISKAKGQPREPQVYTLPPSREEMTKNQVSLWCLVKGFYPSDIAVEWESNGQPENNYKTTPPVLDSDGSFFLYSKLTVDKSRWQQGNVFSCSVMHEALHNHYTQKSLSLSPGK

SEQ ID NO: 400 - protein, 680 aa, Artificial Sequence
  artificial antibody construct
EVQLQESGPGLVKPSETLSLTCTVSGGSVSSGSYYWSWIRQPPGKGLEWIGYIYYSGSTNYNPSLKSRVTISVDTSKNQFSLKLSSVTAADTAVYYCARNPISIPAFDIWGQGTMVTVSSASTKGPSVFPLAPSSKSTSGGTAALGCLVKDYFPEPVTVSWNSGALTSGVHTFPAVLQSSGLYSLSSVVTVPSSSLGTQTYICNVNHKPSNTKVDKKVEPKSCDKTHTCPPCPAPELLGGPSVFLFPPKPKDTLMISRTPEVTCVVVDVSHEDPEVKFNWYVDGVEVHNAKTKPREEQYNSTYRVVSVLTVLHQDWLNGKEYKCKVSNKALPAPIEKTISKAKGQPREPQVYTLPPSREEMTKNQVSLSCAVKGFYPSDIAVEWESNGQPENNYKTTPPVLDSDGSFFLVSKLTVDKSRWQQGNVFSCSVMHEALHNHYTQKSLSLSPGSTGSQVQLQQSGPELVKPGASVKMSCKASGYTFTDYVINWGKQRSGQGLEWIGEIYPGSGTNYYNEKFKAKATLTADKSSNIAYMQLSSLTSEDSAVYFCARRGRYGLYAMDYWGQGTSVTVSSRTVAAPSVFIFPPSDEQLKSGTASVVCLLNNFYPREAKVQWKVDNALQSGNSQESVTEQDSKDSTYSLSSTLTLSKADYEKHKVYACEVTHQGLSSPVTKSFNRGEC

SEQ ID NO: 401 - protein, 214 aa, Artificial Sequence; identical to SEQ ID NO: 395
  artificial antibody construct

SEQ ID NO: 402 - protein, 441 aa, Artificial Sequence; identical to SEQ ID NO: 399
  artificial antibody construct

SEQ ID NO: 403 - protein, 676 aa, Artificial Sequence
  artificial antibody construct
EVQLQESGPGLVKPSETLSLTCTVSGGSVSSGSYYWSWIRQPPGKGLEWIGYIYYSGSTNYNPSLKSRVTISVDTSKNQFSLKLSSVTAADTAVYYCARNPISIPAFDIWGQGTMVTVSSASTKGPSVFPLAPSSKSTSGGTAALGCLVKDYFPEPVTVSWNSGALTSGVHTFPAVLQSSGLYSLSSVVTVPSSSLGTQTYICNVNHKPSNTKVDKKVEPKSCDKTHTCPPCPAPELLGGPSVFLFPPKPKDTLMISRTPEVTCVVVDVSHEDPEVKFNWYVDGVEVHNAKTKPREEQYNSTYRVVSVLTVLHQDWLNGKEYKCKVSNKALPAPIEKTISKAKGQPREPQVYTLPPSREEMTKNQVSLSCAVKGFYPSDIAVEWESNGQPENNYKTTPPVLDSDGSFFLVSKLTVDKSRWQQGNVFSCSVMHEALHNHYTQKSLSLSPGSTGSEVQLQQSGPELVKPGASVKISCKTSGYTFTEYTMHWVKQSHGKSLEWIGGISPNIGGTSYNQKFKGKATLTVDKSSSTAYMELRSLTSEDSAVYYCARRGGSFDYWGQGTTLTVSSRTVAAPSVFIFPPSDEQLKSGTASVVCLLNNFYPREAKVQWKVDNALQSGNSQESVTEQDSKDSTYSLSSTLTLSKADYEKHKVYACEVTHQGLSSPVTKSFNRGEC

SEQ ID NO: 404 - protein, 214 aa, Artificial Sequence; identical to SEQ ID NO: 398
  artificial antibody construct

SEQ ID NO: 405 - protein, 446 aa, Artificial Sequence
  artificial antibody construct
DIVMTQSPATLSLSPGERATLSCRSSKSLQNVNGNTYLYWFQQKPGQSPQLLIYRMSNLNSGVPDRFSGSGSGTEFTLTISSLEPEDFAVYYCMQHLEYPITFGAGTKLEIKRTVAAPSVFIFPPSDEQLKSGTASVVCLLNNFYPREAKVQWKVDNALQSGNSQESVTEQDSKDSTYSLSSTLTLSKADYEKHKVYACEVTHQGLSSPVTKSFNRGECDKTHTCPPCPAPELLGGPDVFLFPPKPKDTLMISRTPEVTCVVVDVSHEDPEVKFNWYVDGVEVHNAKTKPREEQYNSTYRVVSVLTVLHQDWLNGKEYKCKVSNKALPAPEEKTISKAKGQPREPQVYTLPPSREEMTKNQVSLWCLVKGFYPSDIAVEWESNGQPENNYKTTPPVLDSDGSFFLYSKLTVDKSRWQQGNVFSCSVMHEALHNHYTQKSLSLSPGK

SEQ ID NO: 406 - protein, 681 aa, Artificial Sequence
  artificial antibody construct
EVQLVESGGGLVKPGGSLKLSCAASGYTFTSYVMHWVRQAPGKGLEWIGYINPYNDGTKYNEKFQGRVTISSDKSISTAYMELSSLRSEDTAMYYCARGTYYYGTRVFDYWGQGTLVTVSSASTKGPSVFPLAPSSKSTSGGTAALGCLVKDYFPEPVTVSWNSGALTSGVHTFPAVLQSSGLYSLSSVVTVPSSSLGTQTYICNVNHKPSNTKVDKKVEPKSCDKTHTCPPCPAPELLGGPDVFLFPPKPKDTLMISRTPEVTCVVVDVSHEDPEVKFNWYVDGVEVHNAKTKPREEQYNSTYRVVSVLTVLHQDWLNGKEYKCKVSNKALPAPEEKTISKAKGQPREPQVYTLPPSREEMTKNQVSLSCAVKGFYPSDIAVEWESNGQPENNYKTTPPVLDSDGSFFLVSKLTVDKSRWQQGNVFSCSVMHEALHNHYTQKSLSLSPGSTGSQVQLQQSGPELVKPGASVKMSCKASGYTFTDYVINWGKQRSGQGLEWIGEIYPGSGTNYYNEKFKAKATLTADKSSNIAYMQLSSLTSEDSAVYFCARRGRYGLYAMDYWGQGTSVTVSSRTVAAPSVFIFPPSDEQLKSGTASVVCLLNNFYPREAKVQWKVDNALQSGNSQESVTEQDSKDSTYSLSSTLTLSKADYEKHKVYACEVTHQGLSSPVTKSFNRGEC

SEQ ID NO: 407 - protein, 214 aa, Artificial Sequence; identical to SEQ ID NO: 395
  artificial antibody construct

SEQ ID NO: 408 - protein, 446 aa, Artificial Sequence; identical to SEQ ID NO: 405
  artificial antibody construct

SEQ ID NO: 409 - protein, 677 aa, Artificial Sequence
  artificial antibody construct
EVQLVESGGGLVKPGGSLKLSCAASGYTFTSYVMHWVRQAPGKGLEWIGYINPYNDGTKYNEKFQGRVTISSDKSISTAYMELSSLRSEDTAMYYCARGTYYYGTRVFDYWGQGTLVTVSSASTKGPSVFPLAPSSKSTSGGTAALGCLVKDYFPEPVTVSWNSGALTSGVHTFPAVLQSSGLYSLSSVVTVPSSSLGTQTYICNVNHKPSNTKVDKKVEPKSCDKTHTCPPCPAPELLGGPDVFLFPPKPKDTLMISRTPEVTCVVVDVSHEDPEVKFNWYVDGVEVHNAKTKPREEQYNSTYRVVSVLTVLHQDWLNGKEYKCKVSNKALPAPEEKTISKAKGQPREPQVYTLPPSREEMTKNQVSLSCAVKGFYPSDIAVEWESNGQPENNYKTTPPVLDSDGSFFLVSKLTVDKSRWQQGNVFSCSVMHEALHNHYTQKSLSLSPGSTGSEVQLQQSGPELVKPGASVKISCKTSGYTFTEYTMHWVKQSHGKSLEWIGGISPNIGGTSYNQKFKGKATLTVDKSSSTAYMELRSLTSEDSAVYYCARRGGSFDYWGQGTTLTVSSRTVAAPSVFIFPPSDEQLKSGTASVVCLLNNFYPREAKVQWKVDNALQSGNSQESVTEQDSKDSTYSLSSTLTLSKADYEKHKVYACEVTHQGLSSPVTKSFNRGEC

SEQ ID NO: 410 - protein, 214 aa, Artificial Sequence; identical to SEQ ID NO: 398
  artificial antibody construct

SEQ ID NO: 411 - protein, 441 aa, Artificial Sequence
  artificial antibody construct
QPVLTQPPSVSVAPGKTARITCGGNNIGSKSVHWYQQKPGQAPVLVIYYDSDRPSGIPERFSGSNSGNTATLTISRVEAGDEADYYCQVWDTSSDHVLFGGGTKLTVLGQPKAAPSVTLFPPSSEELQANKATLVCLISDFYPGAVTVAWKADSSPVKAGVETTTPSKQSNNKYAASSYLSLTPEQWKSHRSYSCQVTHEGSTVEKTVAPTECSDKTHTCPPCPAPELLGGPDVFLFPPKPKDTLMISRTPEVTCVVVDVSHEDPEVKFNWYVDGVEVHNAKTKPREEQYNSTYRVVSVLTVLHQDWLNGKEYKCKVSNKALPAPEEKTISKAKGQPREPQVYTLPPSREEMTKNQVSLWCLVKGFYPSDIAVEWESNGQPENNYKTTPPVLDSDGSFFLYSKLTVDKSRWQQGNVFSCSVMHEALHNHYTQKSLSLSPGK

SEQ ID NO: 412 - protein, 680 aa, Artificial Sequence
  artificial antibody construct
EVQLQESGPGLVKPSETLSLTCTVSGGSVSSGSYYWSWIRQPPGKGLEWIGYIYYSGSTNYNPSLKSRVTISVDTSKNQFSLKLSSVTAADTAVYYCARNPISIPAFDIWGQGTMVTVSSASTKGPSVFPLAPSSKSTSGGTAALGCLVKDYFPEPVTVSWNSGALTSGVHTFPAVLQSSGLYSLSSVVTVPSSSLGTQTYICNVNHKPSNTKVDKKVEPKSCDKTHTCPPCPAPELLGGPDVFLFPPKPKDTLMISRTPEVTCVVVDVSHEDPEVKFNWYVDGVEVHNAKTKPREEQYNSTYRVVSVLTVLHQDWLNGKEYKCKVSNKALPAPEEKTISKAKGQPREPQVYTLPPSREEMTKNQVSLSCAVKGFYPSDIAVEWESNGQPENNYKTTPPVLDSDGSFFLVSKLTVDKSRWQQGNVFSCSVMHEALHNHYTQKSLSLSPGSTGSQVQLQQSGPELVKPGASVKMSCKASGYTFTDYVINWGKQRSGQGLEWIGEIYPGSGTNYYNEKFKAKATLTADKSSNIAYMQLSSLTSEDSAVYFCARRGRYGLYAMDYWGQGTSVTVSSRTVAAPSVFIFPPSDEQLKSGTASVVCLLNNFYPREAKVQWKVDNALQSGNSQESVTEQDSKDSTYSLSSTLTLSKADYEKHKVYACEVTHQGLSSPVTKSFNRGEC

SEQ ID NO: 413 - protein, 214 aa, Artificial Sequence; identical to SEQ ID NO: 395
  artificial antibody construct

SEQ ID NO: 414 - protein, 441 aa, Artificial Sequence; identical to SEQ ID NO: 411
  artificial antibody construct

SEQ ID NO: 415 - protein, 676 aa, Artificial Sequence
  artificial antibody construct
EVQLQESGPGLVKPSETLSLTCTVSGGSVSSGSYYWSWIRQPPGKGLEWIGYIYYSGSTNYNPSLKSRVTISVDTSKNQFSLKLSSVTAADTAVYYCARNPISIPAFDIWGQGTMVTVSSASTKGPSVFPLAPSSKSTSGGTAALGCLVKDYFPEPVTVSWNSGALTSGVHTFPAVLQSSGLYSLSSVVTVPSSSLGTQTYICNVNHKPSNTKVDKKVEPKSCDKTHTCPPCPAPELLGGPDVFLFPPKPKDTLMISRTPEVTCVVVDVSHEDPEVKFNWYVDGVEVHNAKTKPREEQYNSTYRVVSVLTVLHQDWLNGKEYKCKVSNKALPAPEEKTISKAKGQPREPQVYTLPPSREEMTKNQVSLSCAVKGFYPSDIAVEWESNGQPENNYKTTPPVLDSDGSFFLVSKLTVDKSRWQQGNVFSCSVMHEALHNHYTQKSLSLSPGSTGSEVQLQQSGPELVKPGASVKISCKTSGYTFTEYTMHWVKQSHGKSLEWIGGISPNIGGTSYNQKFKGKATLTVDKSSSTAYMELRSLTSEDSAVYYCARRGGSFDYWGQGTTLTVSSRTVAAPSVFIFPPSDEQLKSGTASVVCLLNNFYPREAKVQWKVDNALQSGNSQESVTEQDSKDSTYSLSSTLTLSKADYEKHKVYACEVTHQGLSSPVTKSFNRGEC

SEQ ID NO: 416 - protein, 214 aa, Artificial Sequence; identical to SEQ ID NO: 398
  artificial antibody construct

SEQ ID NO: 417 - protein, 729 aa, Artificial Sequence
  artificial antibody construct
EVQLVESGGGLVKPGGSLKLSCAASGYTFTSYVMHWVRQAPGKGLEWIGYINPYNDGTKYNEKFQGRVTISSDKSISTAYMELSSLRSEDTAMYYCARGTYYYGTRVFDYWGQGTLVTVSSASTKGPSVFPLAPSSKSTSGGTAALGCLVKDYFPEPVTVSWNSGALTSGVHTFPAVLQSSGLYSLSSVVTVPSSSLGTQTYICNVNHKPSNTKVDKKVEPKSCDKTHTCPPCPAPELLGGPSVFLFPPKPKDTLMISRTPEVTCVVVDVSHEDPEVKFNWYVDGVEVHNAKTKPREEQYNSTYRVVSVLTVLHQDWLNGKEYKCKVSNKALPAPIEKTISKAKGQPREPQVYTLPPSREEMTKNQVSLWCLVKGFYPSDIAVEWESNGQPENNYKTTPPVLDSDGSFFLYSKLTVDKSRWQQGNVFSCSVMHEALHNHYTQKSLSLSPGGGGGSGGGGSGGGGSGGGGSGGGGSGGGGSQVQLVESGGGLVKPGGSLRLSCAASGFTFSSYGMHWVRQAPGKGLEWVAFIRYDGSNKYYADSVKGRFTISRDNSKNTLYLQMNSLRAEDTAVYYCAKDRGLGDGTYFDYWGQGTTVTVSSGGSGGSGGSGGSGGSGGSQSALTQPASVSGSPGQSITISCSGSSSNIGNNAVNWYQQLPGKAPKLLIYYDDLLPSGVSDRFSGSKSGTSAFLAISGLQSEDEADYYCAAWDDSLNGPVFGGGTKLTVL

SEQ ID NO: 418 - protein, 219 aa, Artificial Sequence; identical to SEQ ID NO: 162
  artificial antibody construct

SEQ ID NO: 419 - protein, 450 aa, Artificial Sequence; identical to SEQ ID NO: 383
  artificial antibody construct

SEQ ID NO: 420 - protein, 721 aa, Artificial Sequence
  artificial antibody construct
EVQLVESGGGLVKPGGSLKLSCAASGYTFTSYVMHWVRQAPGKGLEWIGYINPYNDGTKYNEKFQGRVTISSDKSISTAYMELSSLRSEDTAMYYCARGTYYYGTRVFDYWGQGTLVTVSSASTKGPSVFPLAPSSKSTSGGTAALGCLVKDYFPEPVTVSWNSGALTSGVHTFPAVLQSSGLYSLSSVVTVPSSSLGTQTYICNVNHKPSNTKVDKKVEPKSCDKTHTCPPCPAPELLGGPSVFLFPPKPKDTLMISRTPEVTCVVVDVSHEDPEVKFNWYVDGVEVHNAKTKPREEQYNSTYRVVSVLTVLHQDWLNGKEYKCKVSNKALPAPIEKTISKAKGQPREPQVYTLPPSREEMTKNQVSLWCLVKGFYPSDIAVEWESNGQPENNYKTTPPVLDSDGSFFLYSKLTVDKSRWQQGNVFSCSVMHEALHNHYTQKSLSLSPGGGGGSGGGGSGGGGSGGGGSGGGGSGGGGSQVQLQQWGAGLLKPSETLSLTCAVYGGSFSGYYWSWIRQPPGKGLEWIGEIDHSGSTNYNPSLKSRVTISVDTSKNQFSLKLSSVTAADTAVYYCARARGPWSFDPWGQGTLVTVSSGGSGGSGGSGGSGGSGGSDIQMTQSPSTLSASVGDRVTITCRASQSISSWLAWYQQKPGKAPKLLIYKASSLESGVPSRFSGSGSGTEFTLTISSLQPDDFATYYCQQYNSYPTFGGGTKVEIK

SEQ ID NO: 421 - protein, 219 aa, Artificial Sequence; identical to SEQ ID NO: 162
  artificial antibody construct

SEQ ID NO: 422 - protein, 450 aa, Artificial Sequence; identical to SEQ ID NO: 383
  artificial antibody construct

SEQ ID NO: 423 - protein, 728 aa, Artificial Sequence
  artificial antibody construct
EVQLQESGPGLVKPSETLSLTCTVSGGSVSSGSYYWSWIRQPPGKGLEWIGYIYYSGSTNYNPSLKSRVTISVDTSKNQFSLKLSSVTAADTAVYYCARNPISIPAFDIWGQGTMVTVSSASTKGPSVFPLAPSSKSTSGGTAALGCLVKDYFPEPVTVSWNSGALTSGVHTFPAVLQSSGLYSLSSVVTVPSSSLGTQTYICNVNHKPSNTKVDKKVEPKSCDKTHTCPPCPAPELLGGPSVFLFPPKPKDTLMISRTPEVTCVVVDVSHEDPEVKFNWYVDGVEVHNAKTKPREEQYNSTYRVVSVLTVLHQDWLNGKEYKCKVSNKALPAPIEKTISKAKGQPREPQVYTLPPSREEMTKNQVSLWCLVKGFYPSDIAVEWESNGQPENNYKTTPPVLDSDGSFFLYSKLTVDKSRWQQGNVFSCSVMHEALHNHYTQKSLSLSPGGGGGSGGGGSGGGGSGGGGSGGGGSGGGGSQVQLVESGGGLVKPGGSLRLSCAASGFTFSSYGMHWVRQAPGKGLEWVAFIRYDGSNKYYADSVKGRFTISRDNSKNTLYLQMNSLRAEDTAVYYCAKDRGLGDGTYFDYWGQGTTVTVSSGGSGGSGGSGGSGGSGGSQSALTQPASVSGSPGQSITISCSGSSSNIGNNAVNWYQQLPGKAPKLLIYYDDLLPSGVSDRFSGSKSGTSAFLAISGLQSEDEADYYCAAWDDSLNGPVFGGGTKLTVL

SEQ ID NO: 424 - protein, 214 aa, Artificial Sequence; identical to SEQ ID NO: 190
  artificial antibody construct

SEQ ID NO: 425 - protein, 449 aa, Artificial Sequence
  artificial antibody construct
EVQLQESGPGLVKPSETLSLTCTVSGGSVSSGSYYWSWIRQPPGKGLEWIGYIYYSGSTNYNPSLKSRVTISVDTSKNQFSLKLSSVTAADTAVYYCARNPISIPAFDIWGQGTMVTVSSASTKGPSVFPLAPSSKSTSGGTAALGCLVKDYFPEPVTVSWNSGALTSGVHTFPAVLQSSGLYSLSSVVTVPSSSLGTQTYICNVNHKPSNTKVDKKVEPKSCDKTHTCPPCPAPELLGGPSVFLFPPKPKDTLMISRTPEVTCVVVDVSHEDPEVKFNWYVDGVEVHNAKTKPREEQYNSTYRVVSVLTVLHQDWLNGKEYKCKVSNKALPAPIEKTISKAKGQPREPQVYTLPPSREEMTKNQVSLSCAVKGFYPSDIAVEWESNGQPENNYKTTPPVLDSDGSFFLVSKLTVDKSRWQQGNVFSCSVMHEALHNHYTQKSLSLSPG

SEQ ID NO: 426 - protein, 720 aa, Artificial Sequence
  artificial antibody construct
EVQLQESGPGLVKPSETLSLTCTVSGGSVSSGSYYWSWIRQPPGKGLEWIGYIYYSGSTNYNPSLKSRVTISVDTSKNQFSLKLSSVTAADTAVYYCARNPISIPAFDIWGQGTMVTVSSASTKGPSVFPLAPSSKSTSGGTAALGCLVKDYFPEPVTVSWNSGALTSGVHTFPAVLQSSGLYSLSSVVTVPSSSLGTQTYICNVNHKPSNTKVDKKVEPKSCDKTHTCPPCPAPELLGGPSVFLFPPKPKDTLMISRTPEVTCVVVDVSHEDPEVKFNWYVDGVEVHNAKTKPREEQYNSTYRVVSVLTVLHQDWLNGKEYKCKVSNKALPAPIEKTISKAKGQPREPQVYTLPPSREEMTKNQVSLWCLVKGFYPSDIAVEWESNGQPENNYKTTPPVLDSDGSFFLYSKLTVDKSRWQQGNVFSCSVMHEALHNHYTQKSLSLSPGGGGGSGGGGSGGGGSGGGGSGGGGSGGGGSQVQLQQWGAGLLKPSETLSLTCAVYGGSFSGYYWSWIRQPPGKGLEWIGEIDHSGSTNYNPSLKSRVTISVDTSKNQFSLKLSSVTAADTAVYYCARARGPWSFDPWGQGTLVTVSSGGSGGSGGSGGSGGSGGSDIQMTQSPSTLSASVGDRVTITCRASQSISSWLAWYQQKPGKAPKLLIYKASSLESGVPSRFSGSGSGTEFTLTISSLQPDDFATYYCQQYNSYPTFGGGTKVEIK

SEQ ID NO: 427 - protein, 214 aa, Artificial Sequence; identical to SEQ ID NO: 190
  artificial antibody construct

SEQ ID NO: 428 - protein, 449 aa, Artificial Sequence; identical to SEQ ID NO: 425
  artificial antibody construct

SEQ ID NO: 429 - protein, 452 aa, Artificial Sequence
  antibody heavy chain
EVQLLESGGGLVQPGGSLRLSCAVSGFTFNSFAMSWVRQAPGKGLEWVSAISGSGGGTYYADSVKGRFTISRDNSKNTLYLQMNSLRAEDTAVYFCAKDKILWFGEPVFDYWGQGTLVTVSSASTKGPSVFPLAPSSKSTSGGTAALGCLVKDYFPEPVTVSWNSGALTSGVHTFPAVLQSSGLYSLSSVVTVPSSSLGTQTYICNVNHKPSNTKVDKRVEPKSCDKTHTCPPCPAPELLGGPSVFLFPPKPKDTLMISRTPEVTCVVVDVSHEDPEVKFNWYVDGVEVHNAKTKPREEQYNSTYRVVSVLTVLHQDWLNGKEYKCKVSNKALPAPIEKTISKAKGQPREPQVYTLPPSREEMTKNQVSLTCLVKGFYPSDIAVEWESNGQPENNYKTTPPVLDSDGSFFLYSKLTVDKSRWQQGNVFSCSVMHEALHNHYTQKSLSLSPGK

SEQ ID NO: 430 - protein, 214 aa, Artificial Sequence
  antibody light chain
EIVLTQSPATLSLSPGERATLSCRASQSVSSYLAWYQQKPGQAPRLLIYDASNRATGIPARFSGSGSGTDFTLTISSLEPEDFAVYYCQQRSNWPPTFGQGTKVEIKRTVAAPSVFIFPPSDEQLKSGTASVVCLLNNFYPREAKVQWKVDNALQSGNSQESVTEQDSKDSTYSLSSTLTLSKADYEKHKVYACEVTHQGLSSPVTKSFNRGEC

SEQ ID NO: 431 - protein, 728 aa, Artificial Sequence
  artificial antibody construct
EVQLVESGGGLVQPGGSLRLSCAASGFNIKDTYIHWVRQAPGKGLEWVARIYPTNGYTRYADSVKGRFTISADTSKNTAYLQMNSLRAEDTAVYYCSRWGGDGFYAMDYWGQGTLVTVSSASTKGPSVFPLAPSSKSTSGGTAALGCLVKDYFPEPVTVSWNSGALTSGVHTFPAVLQSSGLYSLSSVVTVPSSSLGTQTYICNVNHKPSNTKVDKKVEPKSCDKTHTCPPCPAPEFEGGPSVFLFPPKPKDTLMISRTPEVTCVVVAVSHEDPEVKFNWYVDGVEVHNAKTKPREEQYNSTYRVVSVLTVLHQDWLNGKEYKCKVSNKALPAPIEKTISKAKGQPREPQVYTLPPSREEMTKNQVSLWCLVKGFYPSDIAVEWESNGQPENNYKTTPPVLDSDGSFFLYSKLTVDKSRWQQGNVFSCSVMHEALHNHYTQKSLSLSPGGGGGSGGGGSGGGGSGGGGSGGGGSGGGGSQVQLVESGGGLVKPGGSLRLSCAASGFTFSSYGMHWVRQAPGKGLEWVAFIRYDGSNKYYADSVKGRFTISRDNSKNTLYLQMNSLRAEDTAVYYCAKDRGLGDGTYFDYWGQGTTVTVSSGGSGGSGGSGGSGGSGGSQSALTQPASVSGSPGQSITISCSGSSSNIGNNAVNWYQQLPGKAPKLLIYYDDLLPSGVSDRFSGSKSGTSAFLAISGLQSEDEADYYCAAWDDSLNGPVFGGGTKLTVL

SEQ ID NO: 432 - protein, 214 aa, Artificial Sequence
  artificial antibody construct
DIQMTQSPSSLSASVGDRVTITCRASQDVNTAVAWYQQKPGKAPKLLIYSASFLYSGVPSRFSGSRSGTDFTLTISSLQPEDFATYYCQQHYTTPPTFGQGTKVEIKRTVAAPSVFIFPPSDEQLKSGTASVVCLLNNFYPREAKVQWKVDNALQSGNSQESVTEQDSKDSTYSLSSTLTLSKADYEKHKVYACEVTHQGLSSPVTKSFNRGEC

SEQ ID NO: 433 - protein, 726 aa, Artificial Sequence
  artificial antibody construct
EVQLVESGGGLVQPGGSLRLSCAASGFNIKDTYIHWVRQAPGKGLEWVARIYPTNGYTRYADSVKGRFTISADTSKNTAYLQMNSLRAEDTAVYYCSRWGGDGFYAMDYWGQGTLVTVSSASTKGPSVFPLAPSSKSTSGGTAALGCLVKDYFPEPVTVSWNSGALTSGVHTFPAVLQSSGLYSLSSVVTVPSSSLGTQTYICNVNHKPSNTKVDKKVEPKSCDKTHTCPPCPAPEFEGGPSVFLFPPKPKDTLMISRTPEVTCVVVAVSHEDPEVKFNWYVDGVEVHNAKTKPREEQYNSTYRVVSVLTVLHQDWLNGKEYKCKVSNKALPAPIEKTISKAKGQPREPQVYTLPPSREEMTKNQVSLSCAVKGFYPSDIAVEWESNGQPENNYKTTPPVLDSDGSFFLVSKLTVDKSRWQQGNVFSCSVMHEALHNHYTQKSLSLSPGGGGGSGGGGSGGGGSGGGGSGGGGSGGGGSSYELTQPLSVSVALGQTARITCGGNNIGSKSVHWYQQKPGQAPVLVIYQDKKRPSGIPERFSGSNSGNTATLTISRAQAGDEADYYCQVWDDYIVLFGCGTKLTVLGGSGGSGGSGGSGGSGGSGGSEVQLVQSGAEVKKPGASVKVSCKASGYTFTNYYMQWVRQAPGQCLEWMGIINPSGGVTSYAQKFQGRVTMTRDTSTSTVYMELSSLRSEDTAVYYCARGSAYYYDFADYWGQGTLVTVSS

SEQ ID NO: 434 - protein, 728 aa, Artificial Sequence; identical to SEQ ID NO: 431
  artificial antibody construct

SEQ ID NO: 435 - protein, 214 aa, Artificial Sequence; identical to SEQ ID NO: 432
  artificial antibody construct

SEQ ID NO: 436 - protein, 726 aa, Artificial Sequence
  artificial antibody construct
EVQLVESGGGLVQPGGSLRLSCAASGFNIKDTYIHWVRQAPGKGLEWVARIYPTNGYTRYADSVKGRFTISADTSKNTAYLQMNSLRAEDTAVYYCSRWGGDGFYAMDYWGQGTLVTVSSASTKGPSVFPLAPSSKSTSGGTAALGCLVKDYFPEPVTVSWNSGALTSGVHTFPAVLQSSGLYSLSSVVTVPSSSLGTQTYICNVNHKPSNTKVDKKVEPKSCDKTHTCPPCPAPEFEGGPSVFLFPPKPKDTLMISRTPEVTCVVVAVSHEDPEVKFNWYVDGVEVHNAKTKPREEQYNSTYRVVSVLTVLHQDWLNGKEYKCKVSNKALPAPIEKTISKAKGQPREPQVYTLPPSREEMTKNQVSLSCAVKGFYPSDIAVEWESNGQPENNYKTTPPVLDSDGSFFLVSKLTVDKSRWQQGNVFSCSVMHEALHNHYTQKSLSLSPGGGGGSGGGGSGGGGSGGGGSGGGGSGGGGSSYELTQPLSVSVALGQTARITCGGHNIGSKNVHWYQQKPGQAPVLVIYQDNKRPSGIPERFSGSNSGNTATLTISRAQAGDEADYYCQVWDNYNVLFGCGTKLTVLGGSGGSGGSGGSGGSGGSGGSEVQLVQSGAEVKKPGASVKVSCKASGYTFTSYYMHWVRQAPGQCLEWMGAIEPTYGSTSYAQKFQGRVTMTRDTSTSTVYMELSSLRSEDTAVYYCARGSAYYYDFADYWGQGTLVTVSS

SEQ ID NO: 437 - protein, 731 aa, Artificial Sequence
  artificial antibody construct
EVQLVESGGGLVQPGGSLRLSCAASGFNIKDTYIHWVRQAPGKGLEWVARIYPTNGYTRYADSVKGRFTISADTSKNTAYLQMNSLRAEDTAVYYCSRWGGDGFYAMDYWGQGTLVTVSSASTKGPSVFPLAPSSKSTSGGTAALGCLVKDYFPEPVTVSWNSGALTSGVHTFPAVLQSSGLYSLSSVVTVPSSSLGTQTYICNVNHKPSNTKVDKKVEPKSCDKTHTCPPCPAPEFEGGPSVFLFPPKPKDTLMISRTPEVTCVVVAVSHEDPEVKFNWYVDGVEVHNAKTKPREEQYNSTYRVVSVLTVLHQDWLNGKEYKCKVSNKALPAPIEKTISKAKGQPREPQVYTLPPSREEMTKNQVSLWCLVKGFYPSDIAVEWESNGQPENNYKTTPPVLDSDGSFFLYSKLTVDKSRWQQGNVFSCSVMHEALHNHYTQKSLSLSPGGGGGSGGGGSGGGGSGGGGSGGGGSGGGGSQSALTQPASVSGSPGQSITISCSGSSSNIGNNAVNWYQQLPGKAPKLLIYYDDLLPSGVSDRFSGSKSGTSAFLAISGLQSEDEADYYCAAWDDSLNGPVFGGGTKLTVLGGSGGSGGSGGSGGSGGSGGSQVQLVESGGGLVKPGGSLRLSCAASGFTFSSYGMHWVRQAPGKGLEWVAFIRYDGSNKYYADSVKGRFTISRDNSKNTLYLQMNSLRAEDTAVYYCAKDRGLGDGTYFDYWGQGTTVTVSS

SEQ ID NO: 438 - protein, 214 aa, Artificial Sequence; identical to SEQ ID NO: 432
  artificial antibody construct

SEQ ID NO: 439 - protein, 726 aa, Artificial Sequence; identical to SEQ ID NO: 436
  artificial antibody construct

SEQ ID NO: 440 - protein, 731 aa, Artificial Sequence; identical to SEQ ID NO: 437
  artificial antibody construct

SEQ ID NO: 441 - protein, 214 aa, Artificial Sequence; identical to SEQ ID NO: 432
  artificial antibody construct

SEQ ID NO: 442 - protein, 731 aa, Artificial Sequence
  artificial antibody construct
EVQLVESGGGLVQPGGSLRLSCAASGFNIKDTYIHWVRQAPGKGLEWVARIYPTNGYTRYADSVKGRFTISADTSKNTAYLQMNSLRAEDTAVYYCSRWGGDGFYAMDYWGQGTLVTVSSASTKGPSVFPLAPSSKSTSGGTAALGCLVKDYFPEPVTVSWNSGALTSGVHTFPAVLQSSGLYSLSSVVTVPSSSLGTQTYICNVNHKPSNTKVDKKVEPKSCDKTHTCPPCPAPEFEGGPSVFLFPPKPKDTLMISRTPEVTCVVVAVSHEDPEVKFNWYVDGVEVHNAKTKPREEQYNSTYRVVSVLTVLHQDWLNGKEYKCKVSNKALPAPIEKTISKAKGQPREPQVYTLPPSREEMTKNQVSLSCAVKGFYPSDIAVEWESNGQPENNYKTTPPVLDSDGSFFLVSKLTVDKSRWQQGNVFSCSVMHEALHNHYTQKSLSLSPGGGGGSGGGGSGGGGSGGGGSGGGGSGGGGSQSALTQPASVSGSPGQSITISCSGSSSNIGNNAVNWYQQLPGKAPKLLIYYDDLLPSGVSDRFSGSKSGTSAFLAISGLQSEDEADYYCAAWDDSLNGPVFGGGTKLTVLGGSGGSGGSGGSGGSGGSGGSQVQLVESGGGLVKPGGSLRLSCAASGFTFSSYGMHWVRQAPGKGLEWVAFIRYDGSNKYYADSVKGRFTISRDNSKNTLYLQMNSLRAEDTAVYYCAKDRGLGDGTYFDYWGQGTTVTVSS

SEQ ID NO: 443 - protein, 726 aa, Artificial Sequence
  artificial antibody construct
EVQLVESGGGLVQPGGSLRLSCAASGFNIKDTYIHWVRQAPGKGLEWVARIYPTNGYTRYADSVKGRFTISADTSKNTAYLQMNSLRAEDTAVYYCSRWGGDGFYAMDYWGQGTLVTVSSASTKGPSVFPLAPSSKSTSGGTAALGCLVKDYFPEPVTVSWNSGALTSGVHTFPAVLQSSGLYSLSSVVTVPSSSLGTQTYICNVNHKPSNTKVDKKVEPKSCDKTHTCPPCPAPEFEGGPSVFLFPPKPKDTLMISRTPEVTCVVVAVSHEDPEVKFNWYVDGVEVHNAKTKPREEQYNSTYRVVSVLTVLHQDWLNGKEYKCKVSNKALPAPIEKTISKAKGQPREPQVYTLPPSREEMTKNQVSLWCLVKGFYPSDIAVEWESNGQPENNYKTTPPVLDSDGSFFLYSKLTVDKSRWQQGNVFSCSVMHEALHNHYTQKSLSLSPGGGGGSGGGGSGGGGSGGGGSGGGGSGGGGSDIQMTQSPSTLSASVGDRVTITCSASSRVGYMHWYQQKPGKAPKLLIYDTSKLASGVPSRFSGSGSGTEFTLTISSLQPDDFATYYCFQGSGYPFTFGGGTKVEIKGGSGGSGGSGGSGGSGGSGGSQVTLRESGPALVKPTQTLTLTCTFSGFSLSTAGMSVGWIRQPPGKALEWLADIWWDDKKHYNPSLKDRLTISKDTSKNQVVLKVTNMDPADTATYYCARDMIFNFYFDVWGQGTTVTVSS

SEQ ID NO: 444 - protein, 214 aa, Artificial Sequence; identical to SEQ ID NO: 432
  artificial antibody construct

SEQ ID NO: 445 - protein, 731 aa, Artificial Sequence; identical to SEQ ID NO: 442
  artificial antibody construct

SEQ ID NO: 446 - protein, 449 aa, Artificial Sequence
  artificial antibody construct
EVQLVESGGGLVQPGGSLRLSCAASGFNIKDTYIHWVRQAPGKGLEWVARIYPTNGYTRYADSVKGRFTISADTSKNTAYLQMNSLRAEDTAVYYCSRWGGDGFYAMDYWGQGTLVTVSSASTKGPSVFPLAPSSKSTSGGTAALGCLVKDYFPEPVTVSWNSGALTSGVHTFPAVLQSSGLYSLSSVVTVPSSSLGTQTYICNVNHKPSNTKVDKKVEPKSCDKTHTCPPCPAPEFEGGPSVFLFPPKPKDTLMISRTPEVTCVVVAVSHEDPEVKFNWYVDGVEVHNAKTKPREEQYNSTYRVVSVLTVLHQDWLNGKEYKCKVSNKALPAPIEKTISKAKGQPREPQVYTLPPSREEMTKNQVSLWCLVKGFYPSDIAVEWESNGQPENNYKTTPPVLDSDGSFFLYSKLTVDKSRWQQGNVFSCSVMHEALHNHYTQKSLSLSPG

SEQ ID NO: 447 - protein, 214 aa, Artificial Sequence; identical to SEQ ID NO: 432
  artificial antibody construct

SEQ ID NO: 448 - protein, 731 aa, Artificial Sequence; identical to SEQ ID NO: 442
  artificial antibody construct

SEQ ID NO: 449 - protein, 254 aa, human
MWQLLLPTALLLLVSAGMRTEDLPKAVVFLEPQWYRVLEKDSVTLKCQGAYSPEDNSTQWFHNESLISSQASSYFIDAATVDDSGEYRCQTNLSTLSDPVQLEVHIGWLLLQAPRWVFKEEDPIHLRCHSWKNTALHKVTYLQNGKGRKYFHHNSDFYIPKATLKDSGSYFCRGLFGSKNVSSETVNITITQGLAVSTISSFFPPGYQVSFCLVMVLLFAVDTGLYFSVKTNIRSSTRDWKDHKFKWRKDPQDK

SEQ ID NO: 450 - protein, 233 aa, human
MWQLLLPTALLLLVSAGMRTEDLPKAVVFLEPQWYSVLEKDSVTLKCQGAYSPEDNSTQWFHNESLISSQASSYFIDAATVNDSGEYRCQTNLSTLSDPVQLEVHIGWLLLQAPRWVFKEEDPIHLRCHSWKNTALHKVTYLQNGKDRKYFHHNSDFHIPKATLKDSGSYFCRGLVGSKNVSSETVNITITQGLAVSTISSFSPPGYQVSFCLVMVLLFAVDTGLYFSVKTNI

SEQ ID NO: 451 - protein, 4 aa, Artificial Sequence
  artificial antibody construct
GGGS

SEQ ID NO: 452 - protein, 12 aa, human
ERKCCVECPPCP

SEQ ID NO: 453 - protein, 16 aa, human
ELKTPLDTTHTCPRCP

SEQ ID NO: 454 - protein, 17 aa, human
ELKTPLGDTTHTCPRCP

SEQ ID NO: 455 - protein, 12 aa, human
ESKYGPPCPSCP

SEQ ID NO: 456 - protein, 119 aa, Artificial Sequence
  antibody variable domain
QVQLVESGGGVVQPGRSLRLSCAASGFTFSSYVLHWVRQAPGKGLDWVAVISDDGRNKYFADSVKGRFTISRDNSKNTLYLQMNSLRAEDTAVYYCVREGYSGSWFDYWGQGTLVTVSS

SEQ ID NO: 457 - protein, 123 aa, Artificial Sequence
  antibody variable domain
EIQLQQTGPELVKPGASVKISCKASGYSFTDYIIFWVKQSHGKSLEWTGNINPYYGSTSYNLKFKGKATLTVDKSSSTAYMQLNSLTSEDSAVYYCVRGVYYYGSSYEAFPYWGQGTLVTVSA

SEQ ID NO: 458 - protein, 107 aa, Artificial Sequence
  antibody variable domain
AIQLTQSPSSLSASVGDRVTITCRASQGISSALAWYQQKPGKAPKLLIYGASSLEGGVPSRFSGSGSGTDFTLTISSLQPEDFATYYCQQFNSYPFTFGPGTKVDIK

SEQ ID NO: 459 - protein, 112 aa, Artificial Sequence
  antibody variable domain
DIQLTQSPLTLSITIGQPASISCKSSQSLLDSDGKTYLNWLLQRPGQSPTRLIYLVSKLDSGVPDRFTGSGSGTDFTLKISRVEAEDLGIYYCWQGAHFPQTFGGGTKLEIK

SEQ ID NO: 460 - protein, 5 aa, Artificial Sequence
  antibody CDR sequence
SYVLH

SEQ ID NO: 461 - protein, 17 aa, Artificial Sequence
  antibody CDR sequence
VISDDGRNKYFADSVKG

SEQ ID NO: 462 - protein, 10 aa, Artificial Sequence
  antibody CDR sequence
EGYSGSWFDY

SEQ ID NO: 463 - protein, 11 aa, Artificial Sequence
  antibody CDR sequence
RASQGISSALA

SEQ ID NO: 464 - protein, 7 aa, Artificial Sequence
  antibody CDR sequence
GASSLEG

SEQ ID NO: 465 - protein, 9 aa, Artificial Sequence
  antibody CDR sequence
QQFNSYPFT

SEQ ID NO: 466 - protein, 5 aa, Artificial Sequence
  antibody CDR sequence
DYIIF

SEQ ID NO: 467 - protein, 17 aa, Artificial Sequence
  antibody CDR sequence
NINPYYGSTSYNLKFKG

SEQ ID NO: 468 - protein, 14 aa, Artificial Sequence
  antibody CDR sequence
GVYYYGSSYEAFPY

SEQ ID NO: 469 - protein, 16 aa, Artificial Sequence
  antibody CDR sequence
KSSQSLLDSDGKTYLN

SEQ ID NO: 470 - protein, 7 aa, Artificial Sequence
  antibody CDR sequence
LVSKLDS

SEQ ID NO: 471 - protein, 9 aa, Artificial Sequence
  antibody CDR sequence
WQGAHFPQT

SEQ ID NO: 472 - protein, 482 aa, Artificial Sequence
  artificial antibody construct
SYELTQPLSVSVALGQTARITCGGHNIGSKNVHWYQQKPGQAPVLVIYQDNKRPSGIPERFSGSNSGNTATLTISRAQAGDEADYYCQVWDNYNVLFGCGTKLTVLGGSGGSQVQLVESGGGVVQPGRSLRLSCAASGFTFSSYVLHWVRQAPGKGLDWVAVISDDGRNKYFADSVKGRFTISRDNSKNTLYLQMNSLRAEDTAVYYCVREGYSGSWFDYWGQGTLVTVSSGGSGGSGGSGGSGGSGGSAIQLTQSPSSLSASVGDRVTITCRASQGISSALAWYQQKPGKAPKLLIYGASSLEGGVPSRFSGSGSGTDFTLTISSLQPEDFATYYCQQFNSYPFTFGPGTKVDIKGGSGGSQVQLVQSGAEVKKPGASVKVSCKASGYTFTSYYMHWVRQAPGQCLEWMGAIEPTYGSTSYAQKFQGRVTMTRDTSTSTVYMELSSLRSEDTAVYYCARGSAYYYDFADYWGQGTLVTVSS

SEQ ID NO: 473 - protein, 491 aa, Artificial Sequence
  artificial antibody construct
SYELTQPLSVSVALGQTARITCGGHNIGSKNVHWYQQKPGQAPVLVIYQDNKRPSGIPERFSGSNSGNTATLTISRAQAGDEADYYCQVWDNYNVLFGCGTKLTVLGGSGGSEIQLQQTGPELVKPGASVKISCKASGYSFTDYIIFWVKQSHGKSLEWTGNINPYYGSTSYNLKFKGKATLTVDKSSSTAYMQLNSLTSEDSAVYYCVRGVYYYGSSYEAFPYWGQGTLVTVSAGGSGGSGGSGGSGGSGGSDIQLTQSPLTLSITIGQPASISCKSSQSLLDSDGKTYLNWLLQRPGQSPTRLIYLVSKLDSGVPDRFTGSGSGTDFTLKISRVEAEDLGIYYCWQGAHFPQTFGGGTKLEIKGGSGGSQVQLVQSGAEVKKPGASVKVSCKASGYTFTSYYMHWVRQAPGQCLEWMGAIEPTYGSTSYAQKFQGRVTMTRDTSTSTVYMELSSLRSEDTAVYYCARGSAYYYDFADYWGQGTLVTVSS

SEQ ID NO: 474 - protein, 493 aa, Artificial Sequence
  artificial antibody construct
QVQLVESGGGVVQPGRSLRLSCAASGFTFSSYVLHWVRQAPGKGLDWVAVISDDGRNKYFADSVKGRFTISRDNSKNTLYLQMNSLRAEDTAVYYCVREGYSGSWFDYWGQGTLVTVSSGGSGGSGGSQPVLTQPPSVSVAPGKTARITCGGNNIGSKSVHWYQQKPGQAPVLVIYYDSDRPSGIPERFSGSNSGNTATLTISRVEAGDEADYYCQVWDTSSDHVLFGGGTKLTVLGGSGGSGGSGGSGGSGGSGGSQVQLQESGPGLVKPSETLSLTCTVSGGSVSSGSYYWSWIRQPPGKGLEWIGYIYYSGSTNYNPSLKSRVTISVDTSKNQFSLKLSSVTAADTAVYYCARNPISIPAFDIWGQGTMVTVSSGGSGGSGGSAIQLTQSPSSLSASVGDRVTITCRASQGISSALAWYQQKPGKAPKLLIYGASSLEGGVPSRFSGSGSGTDFTLTISSLQPEDFATYYCQQFNSYPFTFGPGTKVDIK

SEQ ID NO: 475 - protein, 498 aa, Artificial Sequence
  artificial antibody construct
QVQLVESGGGVVQPGRSLRLSCAASGFTFSSYVLHWVRQAPGKGLDWVAVISDDGRNKYFADSVKGRFTISRDNSKNTLYLQMNSLRAEDTAVYYCVREGYSGSWFDYWGQGTLVTVSSGGSGGSGGSDIVMTQSPATLSLSPGERATLSCRSSKSLQNVNGNTYLYWFQQKPGQSPQLLIYRMSNLNSGVPDRFSGSGSGTEFTLTISSLEPEDFAVYYCMQHLEYPITFGAGTKLEIKGGSGGSGGSGGSGGSGGSGGSEVQLVESGGGLVKPGGSLKLSCAASGYTFTSYVMHWVRQAPGKGLEWIGYINPYNDGTKYNEKFQGRVTISSDKSISTAYMELSSLRSEDTAMYYCARGTYYYGTRVFDYWGQGTLVTVSSGGSGGSGGSAIQLTQSPSSLSASVGDRVTITCRASQGISSALAWYQQKPGKAPKLLIYGASSLEGGVPSRFSGSGSGTDFTLTISSLQPEDFATYYCQQFNSYPFTFGPGTKVDIK

SEQ ID NO: 476 - protein, 502 aa, Artificial Sequence
  artificial antibody construct
EIQLQQTGPELVKPGASVKISCKASGYSFTDYIIFWVKQSHGKSLEWTGNINPYYGSTSYNLKFKGKATLTVDKSSSTAYMQLNSLTSEDSAVYYCVRGVYYYGSSYEAFPYWGQGTLVTVSAGGSGGSGGSQPVLTQPPSVSVAPGKTARITCGGNNIGSKSVHWYQQKPGQAPVLVIYYDSDRPSGIPERFSGSNSGNTATLTISRVEAGDEADYYCQVWDTSSDHVLFGGGTKLTVLGGSGGSGGSGGSGGSGGSGGSQVQLQESGPGLVKPSETLSLTCTVSGGSVSSGSYYWSWIRQPPGKGLEWIGYIYYSGSTNYNPSLKSRVTISVDTSKNQFSLKLSSVTAADTAVYYCARNPISIPAFDIWGQGTMVTVSSGGSGGSGGSDIQLTQSPLTLSITIGQPASISCKSSQSLLDSDGKTYLNWLLQRPGQSPTRLIYLVSKLDSGVPDRFTGSGSGTDFTLKISRVEAEDLGIYYCWQGAHFPQTFGGGTKLEIK

SEQ ID NO: 477 - protein, 507 aa, Artificial Sequence
  artificial antibody construct
EIQLQQTGPELVKPGASVKISCKASGYSFTDYIIFWVKQSHGKSLEWTGNINPYYGSTSYNLKFKGKATLTVDKSSSTAYMQLNSLTSEDSAVYYCVRGVYYYGSSYEAFPYWGQGTLVTVSAGGSGGSGGSDIVMTQSPATLSLSPGERATLSCRSSKSLQNVNGNTYLYWFQQKPGQSPQLLIYRMSNLNSGVPDRFSGSGSGTEFTLTISSLEPEDFAVYYCMQHLEYPITFGAGTKLEIKGGSGGSGGSGGSGGSGGSGGSEVQLVESGGGLVKPGGSLKLSCAASGYTFTSYVMHWVRQAPGKGLEWIGYINPYNDGTKYNEKFQGRVTISSDKSISTAYMELSSLRSEDTAMYYCARGTYYYGTRVFDYWGQGTLVTVSSGGSGGSGGSDIQLTQSPLTLSITIGQPASISCKSSQSLLDSDGKTYLNWLLQRPGQSPTRLIYLVSKLDSGVPDRFTGSGSGTDFTLKISRVEAEDLGIYYCWQGAHFPQTFGGGTKLEIK

SEQ ID NO: 478 - protein, 482 aa, Artificial Sequence
  artificial antibody construct
AIQLTQSPSSLSASVGDRVTITCRASQGISSALAWYQQKPGKAPKLLIYGASSLEGGVPSRFSGSGSGTDFTLTISSLQPEDFATYYCQQFNSYPFTFGPGTKVDIKGGSGGSQVQLVESGGGVVQPGRSLRLSCAASGFTFSSYVLHWVRQAPGKGLDWVAVISDDGRNKYFADSVKGRFTISRDNSKNTLYLQMNSLRAEDTAVYYCVREGYSGSWFDYWGQGTLVTVSSGGSGGSGGSGGSGGSGGSAIQLTQSPSSLSASVGDRVTITCRASQGISSALAWYQQKPGKAPKLLIYGASSLEGGVPSRFSGSGSGTDFTLTISSLQPEDFATYYCQQFNSYPFTFGPGTKVDIKGGSGGSQVQLVESGGGVVQPGRSLRLSCAASGFTFSSYVLHWVRQAPGKGLDWVAVISDDGRNKYFADSVKGRFTISRDNSKNTLYLQMNSLRAEDTAVYYCVREGYSGSWFDYWGQGTLVTVSS

SEQ ID NO: 479 - protein, 500 aa, Artificial Sequence
  artificial antibody construct
DIQLTQSPLTLSITIGQPASISCKSSQSLLDSDGKTYLNWLLQRPGQSPTRLIYLVSKLDSGVPDRFTGSGSGTDFTLKISRVEAEDLGIYYCWQGAHFPQTFGGGTKLEIKGGSGGSEIQLQQTGPELVKPGASVKISCKASGYSFTDYIIFWVKQSHGKSLEWTGNINPYYGSTSYNLKFKGKATLTVDKSSSTAYMQLNSLTSEDSAVYYCVRGVYYYGSSYEAFPYWGQGTLVTVSAGGSGGSGGSGGSGGSGGSDIQLTQSPLTLSITIGQPASISCKSSQSLLDSDGKTYLNWLLQRPGQSPTRLIYLVSKLDSGVPDRFTGSGSGTDFTLKISRVEAEDLGIYYCWQGAHFPQTFGGGTKLEIKGGSGGSEIQLQQTGPELVKPGASVKISCKASGYSFTDYIIFWVKQSHGKSLEWTGNINPYYGSTSYNLKFKGKATLTVDKSSSTAYMQLNSLTSEDSAVYYCVRGVYYYGSSYEAFPYWGQGTLVTVSA

SEQ ID NO: 480 - protein, 503 aa, Artificial Sequence
  artificial antibody construct
EVQLVESGGGLVKPGGSLKLSCAASGYTFTSYVMHWVRQAPGKGLEWIGYINPYNDGTKYNEKFQGRVTISSDKSISTAYMELSSLRSEDTAMYYCARGTYYYGTRVFDYWGQGTLVTVSSGGSGGSGGSGGSGGSGGSDIVMTQSPATLSLSPGERATLSCRSSKSLQNVNGNTYLYWFQQKPGQSPQLLIYRMSNLNSGVPDRFSGSGSGTEFTLTISSLEPEDFAVYYCMQHLEYPITFGAGTKLEIKGGGGSAIQLTQSPSSLSASVGDRVTITCRASQGISSALAWYQQKPGKAPKLLIYGASSLEGGVPSRFSGSGSGTDFTLTISSLQPEDFATYYCQQFNSYPFTFGPGTKVDIKGGSGGSGGSGGSGGSGGSGGSQVQLVESGGGVVQPGRSLRLSCAASGFTFSSYVLHWVRQAPGKGLDWVAVISDDGRNKYFADSVKGRFTISRDNSKNTLYLQMNSLRAEDTAVYYCVREGYSGSWFDYWGQGTLVTVSS

SEQ ID NO: 481 - protein, 498 aa, Artificial Sequence
  artificial antibody construct
EVQLQESGPGLVKPSETLSLTCTVSGGSVSSGSYYWSWIRQPPGKGLEWIGYIYYSGSTNYNPSLKSRVTISVDTSKNQFSLKLSSVTAADTAVYYCARNPISIPAFDIWGQGTMVTVSSGGSGGSGGSGGSGGSGGSQPVLTQPPSVSVAPGKTARITCGGNNIGSKSVHWYQQKPGQAPVLVIYYDSDRPSGIPERFSGSNSGNTATLTISRVEAGDEADYYCQVWDTSSDHVLFGGGTKLTVLGGGGSAIQLTQSPSSLSASVGDRVTITCRASQGISSALAWYQQKPGKAPKLLIYGASSLEGGVPSRFSGSGSGTDFTLTISSLQPEDFATYYCQQFNSYPFTFGPGTKVDIKGGSGGSGGSGGSGGSGGSGGSQVQLVESGGGVVQPGRSLRLSCAASGFTFSSYVLHWVRQAPGKGLDWVAVISDDGRNKYFADSVKGRFTISRDNSKNTLYLQMNSLRAEDTAVYYCVREGYSGSWFDYWGQGTLVTVSS

SEQ ID NO: 482 - protein, 247 aa, Artificial Sequence
  artificial antibody construct
AIQLTQSPSSLSASVGDRVTITCRASQGISSALAWYQQKPGKAPKLLIYGASSLEGGVPSRFSGSGSGTDFTLTISSLQPEDFATYYCQQFNSYPFTFGPGTKVDIKGGSGGSGGSGGSGGSGGSGGSQVQLVESGGGVVQPGRSLRLSCAASGFTFSSYVLHWVRQAPGKGLDWVAVISDDGRNKYFADSVKGRFTISRDNSKNTLYLQMNSLRAEDTAVYYCVREGYSGSWFDYWGQGTLVTVSS

SEQ ID NO: 483 - protein, 256 aa, Artificial Sequence
  artificial antibody construct
DIQLTQSPLTLSITIGQPASISCKSSQSLLDSDGKTYLNWLLQRPGQSPTRLIYLVSKLDSGVPDRFTGSGSGTDFTLKISRVEAEDLGIYYCWQGAHFPQTFGGGTKLEIKGGSGGSGGSGGSGGSGGSGGSEIQLQQTGPELVKPGASVKISCKASGYSFTDYIIFWVKQSHGKSLEWTGNINPYYGSTSYNLKFKGKATLTVDKSSSTAYMQLNSLTSEDSAVYYCVRGVYYYGSSYEAFPYWGQGTLVTVSA

SEQ ID NO: 484 - protein, 449 aa, Artificial Sequence; identical to SEQ ID NO: 446
  artificial antibody construct

SEQ ID NO: 485 - protein, 726 aa, Artificial Sequence
  artificial antibody construct
EVQLVESGGGLVQPGGSLRLSCAASGFNIKDTYIHWVRQAPGKGLEWVARIYPTNGYTRYADSVKGRFTISADTSKNTAYLQMNSLRAEDTAVYYCSRWGGDGFYAMDYWGQGTLVTVSSASTKGPSVFPLAPSSKSTSGGTAALGCLVKDYFPEPVTVSWNSGALTSGVHTFPAVLQSSGLYSLSSVVTVPSSSLGTQTYICNVNHKPSNTKVDKKVEPKSCDKTHTCPPCPAPEFEGGPSVFLFPPKPKDTLMISRTPEVTCVVVAVSHEDPEVKFNWYVDGVEVHNAKTKPREEQYNSTYRVVSVLTVLHQDWLNGKEYKCKVSNKALPAPIEKTISKAKGQPREPQVYTLPPSREEMTKNQVSLSCAVKGFYPSDIAVEWESNGQPENNYKTTPPVLDSDGSFFLVSKLTVDKSRWQQGNVFSCSVMHEALHNHYTQKSLSLSPGGGGGSGGGGSGGGGSGGGGSGGGGSGGGGSAIQLTQSPSSLSASVGDRVTITCRASQGISSALAWYQQKPGKAPKLLIYGASSLEGGVPSRFSGSGSGTDFTLTISSLQPEDFATYYCQQFNSYPFTFGPGTKVDIKGGSGGSGGSGGSGGSGGSGGSQVQLVESGGGVVQPGRSLRLSCAASGFTFSSYVLHWVRQAPGKGLDWVAVISDDGRNKYFADSVKGRFTISRDNSKNTLYLQMNSLRAEDTAVYYCVREGYSGSWFDYWGQGTLVTVSS

SEQ ID NO: 486 - protein, 214 aa, Artificial Sequence; identical to SEQ ID NO: 432
  artificial antibody construct

SEQ ID NO: 487 - protein, 449 aa, Artificial Sequence; identical to SEQ ID NO: 446
  artificial antibody construct

SEQ ID NO: 488 - protein, 735 aa, Artificial Sequence
  artificial antibody construct
EVQLVESGGGLVQPGGSLRLSCAASGFNIKDTYIHWVRQAPGKGLEWVARIYPTNGYTRYADSVKGRFTISADTSKNTAYLQMNSLRAEDTAVYYCSRWGGDGFYAMDYWGQGTLVTVSSASTKGPSVFPLAPSSKSTSGGTAALGCLVKDYFPEPVTVSWNSGALTSGVHTFPAVLQSSGLYSLSSVVTVPSSSLGTQTYICNVNHKPSNTKVDKKVEPKSCDKTHTCPPCPAPEFEGGPSVFLFPPKPKDTLMISRTPEVTCVVVAVSHEDPEVKFNWYVDGVEVHNAKTKPREEQYNSTYRVVSVLTVLHQDWLNGKEYKCKVSNKALPAPIEKTISKAKGQPREPQVYTLPPSREEMTKNQVSLSCAVKGFYPSDIAVEWESNGQPENNYKTTPPVLDSDGSFFLVSKLTVDKSRWQQGNVFSCSVMHEALHNHYTQKSLSLSPGGGGGSGGGGSGGGGSGGGGSGGGGSGGGGSDIQLTQSPLTLSITIGQPASISCKSSQSLLDSDGKTYLNWLLQRPGQSPTRLIYLVSKLDSGVPDRFTGSGSGTDFTLKISRVEAEDLGIYYCWQGAHFPQTFGGGTKLEIKGGSGGSGGSGGSGGSGGSGGSEIQLQQTGPELVKPGASVKISCKASGYSFTDYIIFWVKQSHGKSLEWTGNINPYYGSTSYNLKFKGKATLTVDKSSSTAYMQLNSLTSEDSAVYYCVRGVYYYGSSYEAFPYWGQGTLVTVSA

SEQ ID NO: 489 - protein, 214 aa, Artificial Sequence; identical to SEQ ID NO: 432
  artificial antibody construct

SEQ ID NO: 490 - protein, 706 aa, Artificial Sequence
  artificial antibody construct
EVQLVESGGGLVQPGGSLRLSCAASGFNIKDTYIHWVRQAPGKGLEWVARIYPTNGYTRYADSVKGRFTISADTSKNTAYLQMNSLRAEDTAVYYCSRWGGDGFYAMDYWGQGTLVTVSSASTKGPSVFPLAPSSKSTSGGTAALGCLVKDYFPEPVTVSWNSGALTSGVHTFPAVLQSSGLYSLSSVVTVPSSSLGTQTYICNVNHKPSNTKVDKKVEPKSCDKTHTCPPCPAPEFEGGPSVFLFPPKPKDTLMISRTPEVTCVVVAVSHEDPEVKFNWYVDGVEVHNAKTKPREEQYNSTYRVVSVLTVLHQDWLNGKEYKCKVSNKALPAPIEKTISKAKGQPREPQVYTLPPSREEMTKNQVSLWCLVKGFYPSDIAVEWESNGQPENNYKTTPPVLDSDGSFFLYSKLTVDKSRWQQGNVFSCSVMHEALHNHYTQKSLSLSPGGGGGSGGGGSSYELTQPLSVSVALGQTARITCGGHNIGSKNVHWYQQKPGQAPVLVIYQDNKRPSGIPERFSGSNSGNTATLTISRAQAGDEADYYCQVWDNYNVLFGCGTKLTVLGGSGGSGGSGGSGGSGGSGGSQVQLVQSGAEVKKPGASVKVSCKASGYTFTSYYMHWVRQAPGQCLEWMGAIEPTYGSTSYAQKFQGRVTMTRDTSTSTVYMELSSLRSEDTAVYYCARGSAYYYDFADYWGQGTLVTVSS

SEQ ID NO: 491 - protein, 726 aa, Artificial Sequence; identical to SEQ ID NO: 485
  artificial antibody construct

SEQ ID NO: 492 - protein, 214 aa, Artificial Sequence; identical to SEQ ID NO: 432
  artificial antibody construct

SEQ ID NO: 493 - protein, 706 aa, Artificial Sequence; identical to SEQ ID NO: 490
  artificial antibody construct

SEQ ID NO: 494 - protein, 735 aa, Artificial Sequence; identical to SEQ ID NO: 488
  artificial antibody construct

SEQ ID NO: 495 - protein, 214 aa, Artificial Sequence; identical to SEQ ID NO: 432
  artificial antibody construct

SEQ ID NO: 496 - protein, 726 aa, Artificial Sequence
  artificial antibody construct
EVQLVESGGGLVQPGGSLRLSCAASGFNIKDTYIHWVRQAPGKGLEWVARIYPTNGYTRYADSVKGRFTISADTSKNTAYLQMNSLRAEDTAVYYCSRWGGDGFYAMDYWGQGTLVTVSSASTKGPSVFPLAPSSKSTSGGTAALGCLVKDYFPEPVTVSWNSGALTSGVHTFPAVLQSSGLYSLSSVVTVPSSSLGTQTYICNVNHKPSNTKVDKKVEPKSCDKTHTCPPCPAPEFEGGPSVFLFPPKPKDTLMISRTPEVTCVVVAVSHEDPEVKFNWYVDGVEVHNAKTKPREEQYNSTYRVVSVLTVLHQDWLNGKEYKCKVSNKALPAPIEKTISKAKGQPREPQVYTLPPSREEMTKNQVSLTCLVKGFYPSDIAVEWESNGQPENNYKTTPPVLDSDGSFFLYSKLTVDKSRWQQGNVFSCSVMHEALHNHYTQKSLSLSPGGGGGSGGGGSGGGGSGGGGSGGGGSGGGGSAIQLTQSPSSLSASVGDRVTITCRASQGISSALAWYQQKPGKAPKLLIYGASSLEGGVPSRFSGSGSGTDFTLTISSLQPEDFATYYCQQFNSYPFTFGPGTKVDIKGGSGGSGGSGGSGGSGGSGGSQVQLVESGGGVVQPGRSLRLSCAASGFTFSSYVLHWVRQAPGKGLDWVAVISDDGRNKYFADSVKGRFTISRDNSKNTLYLQMNSLRAEDTAVYYCVREGYSGSWFDYWGQGTLVTVSS

SEQ ID NO: 497 - protein, 214 aa, Artificial Sequence; identical to SEQ ID NO: 432
  artificial antibody construct

SEQ ID NO: 498 - protein, 735 aa, Artificial Sequence
  artificial antibody construct
EVQLVESGGGLVQPGGSLRLSCAASGFNIKDTYIHWVRQAPGKGLEWVARIYPTNGYTRYADSVKGRFTISADTSKNTAYLQMNSLRAEDTAVYYCSRWGGDGFYAMDYWGQGTLVTVSSASTKGPSVFPLAPSSKSTSGGTAALGCLVKDYFPEPVTVSWNSGALTSGVHTFPAVLQSSGLYSLSSVVTVPSSSLGTQTYICNVNHKPSNTKVDKKVEPKSCDKTHTCPPCPAPEFEGGPSVFLFPPKPKDTLMISRTPEVTCVVVAVSHEDPEVKFNWYVDGVEVHNAKTKPREEQYNSTYRVVSVLTVLHQDWLNGKEYKCKVSNKALPAPIEKTISKAKGQPREPQVYTLPPSREEMTKNQVSLTCLVKGFYPSDIAVEWESNGQPENNYKTTPPVLDSDGSFFLYSKLTVDKSRWQQGNVFSCSVMHEALHNHYTQKSLSLSPGGGGGSGGGGSGGGGSGGGGSGGGGSGGGGSDIQLTQSPLTLSITIGQPASISCKSSQSLLDSDGKTYLNWLLQRPGQSPTRLIYLVSKLDSGVPDRFTGSGSGTDFTLKISRVEAEDLGIYYCWQGAHFPQTFGGGTKLEIKGGSGGSGGSGGSGGSGGSGGSEIQLQQTGPELVKPGASVKISCKASGYSFTDYIIFWVKQSHGKSLEWTGNINPYYGSTSYNLKFKGKATLTVDKSSSTAYMQLNSLTSEDSAVYYCVRGVYYYGSSYEAFPYWGQGTLVTVSA

SEQ ID NO: 499 - protein, 214 aa, Artificial Sequence; identical to SEQ ID NO: 432
  artificial antibody construct

SEQ ID NO: 500 - protein, 726 aa, Artificial Sequence; identical to SEQ ID NO: 485
  artificial antibody construct

SEQ ID NO: 501 - protein, 941 aa, Artificial Sequence
  artificial antibody construct
EVQLVESGGGLVQPGGSLRLSCAASGFNIKDTYIHWVRQAPGKGLEWVARIYPTNGYTRYADSVKGRFTISADTSKNTAYLQMNSLRAEDTAVYYCSRWGGDGFYAMDYWGQGTLVTVSSASTKGPSVFPLAPSSKSTSGGTAALGCLVKDYFPEPVTVSWNSGALTSGVHTFPAVLQSSGLYSLSSVVTVPSSSLGTQTYICNVNHKPSNTKVDKKVEPKSCDKTHTCPPCPAPEFEGGPSVFLFPPKPKDTLMISRTPEVTCVVVAVSHEDPEVKFNWYVDGVEVHNAKTKPREEQYNSTYRVVSVLTVLHQDWLNGKEYKCKVSNKALPAPIEKTISKAKGQPREPQVYTLPPSREEMTKNQVSLWCLVKGFYPSDIAVEWESNGQPENNYKTTPPVLDSDGSFFLYSKLTVDKSRWQQGNVFSCSVMHEALHNHYTQKSLSLSPGGGGGSGGGGSSYELTQPLSVSVALGQTARITCGGHNIGSKNVHWYQQKPGQAPVLVIYQDNKRPSGIPERFSGSNSGNTATLTISRAQAGDEADYYCQVWDNYNVLFGCGTKLTVLGGSGGSQVQLVQSGAEVKKPGASVKVSCKASGYTFTSYYMHWVRQAPGQCLEWMGAIEPTYGSTSYAQKFQGRVTMTRDTSTSTVYMELSSLRSEDTAVYYCARGSAYYYDFADYWGQGTLVTVSSGGSGGSGGSGGSGGSGGSSYELTQPLSVSVALGQTARITCGGHNIGSKNVHWYQQKPGQAPVLVIYQDNKRPSGIPERFSGSNSGNTATLTISRAQAGDEADYYCQVWDNYNVLFGCGTKLTVLGGSGGSQVQLVQSGAEVKKPGASVKVSCKASGYTFTSYYMHWVRQAPGQCLEWMGAIEPTYGSTSYAQKFQGRVTMTRDTSTSTVYMELSSLRSEDTAVYYCARGSAYYYDFADYWGQGTLVTVSS

SEQ ID NO: 502 - protein, 214 aa, Artificial Sequence; identical to SEQ ID NO: 432
  artificial antibody construct

1. A trispecific antibody construct comprising
(i) a first binding domain (A), which is capable of specifically binding to a first target (A′) that is CD16A on the surface of an immune effector cell;
(ii) a second binding domain (B), which is capable of specifically binding to a second target (B′) that is another antigen on the surface of an immune effector cell, wherein said antigen is selected from the group comprising CD56, NKG2A, NKG2D, NKp30, NKp44, NKp46, NKp80, DNAM-1, SLAMF7, OX40, CD47/SIRPα, CD89, CD96, CD137, CD160, TIGIT, nectin-4, PD-1, PD-L1, LAG-3, CTLA-4, TIM-3, KIR2DL1-5, KIR3DL1-3, KIR2DS1-5 and CD3; and
(iii) a third binding domain (C), which is capable of specifically binding to a third target (C′) that is an antigen on the surface of a target cell,
wherein the first binding domain (A) comprises an VH and a VL domain of an antibody.

2. The antibody construct of claim 1, wherein the first binding domain (A) binds to an epitope on CD16A which is C-terminal to the physiological Fcγ receptor binding domain, said epitope preferably comprises Y158 of SEQ ID NO: 449.

3. The antibody construct of claim 1 or 2, wherein the first binding domain (A) and the second binding domain (B) are positioned to each other in a way that simultaneous binding of two immune effector cells is reduced or preferably prevented.

4. The antibody construct of any one of the preceding claims, wherein the antibody construct binds to a target cell and one immune effector cell simultaneously.

5. The antibody construct of any one of the preceding claims, further comprising a fourth domain (D) comprising a half-life extension domain.

6. The antibody construct of claim 5, wherein said half-life extension domain comprises a CH2 domain, wherein the Fcγ receptor binding domain is silenced.

7. The antibody construct of claim 5 or 6, wherein said half-life extension domain comprises a CH3 domain.

8. The antibody construct of any one of claims 5 to 7, wherein the antibody construct comprise at least one hinge domain and CH3 domain fused to a CH2 domain in an amino to carboxyl order in the order hinge domain-CH2 domain-CH3 domain.

9. The antibody construct of any one of claims 5 to 8, wherein the antibody construct comprises at least two of the hinge domain-CH2 domain-CH3 domain elements.

10. The antibody construct of any one of the preceding claims, wherein the third binding domain (C) comprises an VH and a VL domain of an antibody.

11. The antibody construct of any one of the preceding claims, wherein the third binding domain (C) binds to an antigen on the surface of a target cell, which antigen is selected from the group consisting of CD19, CD20, CD22, CD30, CD33, CD52, CD70, CD74, CD79b, CD123, CLL1, BCMA, FCRH5, EGFR, EGFRvlll, HER2, and GD2.

12. The antibody construct of any one of the preceding claims, wherein the second binding domain (B) comprises an VH and a VL domain of an antibody.

13. The antibody construct of any one of the preceding claims, wherein the first binding domain (A) is fused to the C terminus of a first CH3 domain and the second binding domain (B) is fused to the C terminus of a second CH3 domain.

14. The antibody construct of claim 13, wherein the antibody construct is monovalent for the first binding domain (A) and monovalent for the second binding domain (B).

15. The antibody construct of any one of claims 1 to 12, wherein the first binding domain (A) is fused to the N-terminus of a first hinge and the second binding domain (B) is fused to the N-terminus of a second hinge.

16. The antibody construct of any one of claims 1 to 12, wherein the first binding domain (A) and the second binding domain (B) are fused to each other.

17. The antibody construct of claim 16, wherein the antibody construct is monovalent for the first binding domain (A) and monovalent for the second binding domain (B).

18. The antibody construct of claim 16, wherein the antibody construct is bivalent for the first binding domain (A) and bivalent for the second binding domain (B), wherein each of the first binding domains (A) is fused to a second binding domain (B).

19. The antibody construct of any one of claims 16 to 18, wherein the C terminus of the VL of the first binding domain (A) is fused to the N terminus of the VH of the second binding domain (B) and the C terminus of the VL of the second binding domain (B) is fused to the N terminus of the VH of the first binding domain (A).

20. The antibody construct of any one of claims 16 to 18, wherein the N terminus of the VL of the first binding domain (A) is fused to the C terminus of the VH of the second binding domain (B) and the N terminus of the VL of the second binding domain (B) is fused to the C terminus of the VH of the first binding domain (A).

21. The antibody construct of any one of claims 16 to 18, wherein the C terminus of the VL of the first binding domain (A) is fused to the N terminus of the VL of the second binding domain (B) and the C terminus of the VH of the first binding domain (A) is fused to the N terminus of the VH of the second binding domain (B).

22. The antibody construct of any one of claims 16 to 18, wherein the C terminus of the VL of the second binding domain (B) is fused to the N terminus of the VL of the first binding domain (A) and the C terminus of the VH of the second binding domain (B) is fused to the N terminus of the VH of the first binding domain (A).

23. The antibody construct of any one of claims 16 to 18, wherein the first binding domain (A) and the second binding domain (B) are fused to each other in form of a bi-scFv, double Fab, db or scDb.

24. The antibody construct of claim 23, wherein the first binding domain (A) and the second binding domain (B) are fused to each other in form of a db or scDb.

25. The antibody construct of claim 24, wherein the variable domains of the db or scDb are arranged in V_{L}-V_{H}-V_{L}-V_{H} order.

26. The antibody construct of any one of claims 15 to 25, wherein (a) the first binding domain (A) is fused N-terminally to a hinge domain and the second binding domain (B) is fused N-terminally to the first binding domain (A); or (b) the first binding domain (A) is fused C-terminally to a CH3 domain and the second binding domain (B) is fused C-terminally to the first binding domain.

27. The antibody construct of any one of claims 15 to 26, wherein the first binding domain (A) is fused N-terminally to a hinge domain and the second binding domain (B) is fused N-terminally to the first binding domain (A).

28. The antibody construct of any one of the preceding claims, wherein the binding site of the first binding domain (A) and the binding site of the second binding domain (B) are within a distance of about 25 nm or less, preferably about 20 nm or less, preferably about 15 nm or less, preferably about 10 nm or less.

29. The antibody construct of any one of the preceding claims, wherein the binding site of the first binding domain (A) and the binding site of the second binding domain (B) are in cis orientation.

30. The antibody construct of any one of the preceding claims, wherein the binding site of the first binding domain (A) and the binding site of the third binding domain (C) are in trans orientation.

31. The antibody construct of any one of the preceding claims, wherein the binding site of the second binding domain (B) and the binding site of the third binding domain (C) are in trans orientation.

32. The antibody construct of any one of the preceding claims, wherein the first binding domain (A) comprises:
(i) a VL region comprising CDR-L1, CDR-L2 and CDR-L3 selected from:
(a) CDR-L1 as depicted in SEQ ID NO: 29, a CDR-L2 as depicted in SEQ ID NO: 30, a CDR-L3 as depicted in SEQ ID NO: 31; and
(b) CDR-L1 as depicted in SEQ ID NO: 35, a CDR-L2 as depicted in SEQ ID NO: 36, a CDR-L3 as depicted in SEQ ID NO: 37;
(ii) a VH region comprising CDR-H1, CDR-H2 and CDR-H3 selected from:
(a) CDR-H1 as depicted in SEQ ID NO: 26, a CDR-H2 as depicted in SEQ ID NO: 27, a CDR-H3 as depicted in SEQ ID NO: 28; and
(b) a CDR-L1 as depicted in SEQ ID NO: 29, a CDR-L2 as depicted in SEQ ID NO: 30, a CDR-L3 as depicted in SEQ ID NO: 31.

33. The antibody construct of any one of the preceding claims, having an amino acid sequence selected from the group consisting of SEQ ID NOs: 161-162; 163-164; 165-166; 167-168; 177-179; 180-182; 183-185; 186-188; 189-191; 192-194; 195-197; 198-200; 225-227; 228-230; 231-233; 234-236 237-238, 239-240, 241-242, 243-244, 245-246, 247-248, 249-250, 251-252; 269-270; 271-272; 273-274; 275-276; 277-278; 279-280; 281-282; 283-284; 293-295; 296-298; 299-301; 302-304; 305-307; 308-310; 311-313; 314-316; 329-331; 332-334; 335-337; 338-340; 353-354; 355-356; 357-358; 359-360; 369-371; 372-374; 375-377; 378-380; 431-433; 434-436; 437-439, 490-492, 493-495, and 500-502.

34. The antibody construct of and one of the preceding claims, wherein the antibody construct induces a lower degree of fratricide as compared to a control construct selected from the group consisting of SEQ ID NOs: 393-395; 396-398; 399-401; 402-404; 405-407; 408-410; 411-413; 414-416; 417-419; 420-422; 423-425; and 426-428.

35. The antibody construct of any one of the preceding claims, wherein the antibody construct induces a lower degree of fratricide as compared to the anti-CD38 antibody of SEQ ID NOs: 429 and 430.

36. The antibody construct of any one of the preceding claims, wherein the antibody construct induces about 25% or less NK cell fratricide in a cytotoxicity assay.

37. A nucleic acid molecule comprising a sequence encoding an antibody construct of any one of claims 1 to 36.

38. A vector comprising a nucleic acid molecule of claim 37.

39. A host cell comprising a nucleic acid molecule of claim 37 or a vector of claim 38.

40. A method of producing an antibody construct of any one of claims 1 to 36, said method comprising culturing a host cell of claim 39 under conditions allowing the expression of the antibody construct of any one of claims 1 to 36 and recovering the produced antibody construct from the culture.

41. A pharmaceutical composition comprising an antibody construct of any one of claims 1 to 36, or produced of the method of claim 40.

42. An antibody construct of any one of claims 1 to 36 for use in therapy.

43. The antibody construct of any one of claims 1 to 36, or produced of the method of claim 40, for use in the prevention, treatment or amelioration of a disease selected from a proliferative disease, a tumorous disease, a viral disease or an immunological disorder.

44. A method of treatment or amelioration of a proliferative disease, a tumorous disease, a viral disease or an immunological disorder, comprising the step of administering to a subject in need thereof the antibody construct of any one of claims 1 to 36, or produced of the process of claim 40.

45. A kit comprising an antibody construct of any one of claims 1 to 36, or produced of the method of claim 40, a nucleic acid molecule of claim 37, a vector of claim 38, and/or a host cell of claim 39.

46. A method of simultaneously binding a target cell and an immune effector cell, comprising administering to a subject the antibody construct of any one of claims 1 to 36, wherein the antibody construct binds the tumor cell and a first immune effector cell but does not essentially bind a further immune effector cell.

47. The method of claim 46, wherein the first binding domain and the second binding domain bind to a first target (A′) and a second target (B′) that are on the same first immune effector cell.

48. The method of claim 46 or 47, wherein the method comprises target cell specific activation of the first immune effector cell.
